(19) United States
(12) Patent Application Publication
(10) Pub. No.: US 2015/0065355 A1
(43) Pub. Date: Mar. 5, 2015

(54) Epigenetic Signatures as Marker for Cardiomyopathies and Myocardial Insufficiencies

(71) Applicant: RUPRECHT-KARLS-UNIVERSITÄT HEILDELBERG, Heidelberg (DE)

(72) Inventors: Benjamin Meder, Dossenheim (DE); Jan Haas, Walldorf (DE); Hugo A. Katus, Heidelberg (DE)

(21) Appl. No.: 14/384,955

(22) PCT Filed: Mar. 14, 2013
(86) PCT No.: PCT/EP2013/055267

§ 371 Date: Sep. 12, 2014

Related U.S. Application Data
(60) Provisional application No. 61/610,841, filed on Mar. 14, 2012.

(51) Int. Cl. C12Q 1/68

(52) U.S. Cl. CPC C12Q 1/6883; C12Q 2600/154; C12Q 2600/118; C12Q 2600/112; C12Q 2600/106
USPC 506/2; 435/6.11; 506/16; 506/9

(57) ABSTRACT

The present invention relates to the use of DNA methylation profiles of patient samples for the diagnosis, prognosis and/or therapy monitoring of a heart disease in a patient, wherein the DNA methylation profile of the patient sample is compared with the DNA methylation profile of a control sample, and wherein a difference in the DNA methylation profile of the patient sample compared to the control sample is indicative of a heart disease or of the risk for developing a heart disease or for a prediction of therapy effects or therapy outcome. The present invention further relates to methods for the diagnosis, prognosis and/or therapy monitoring of a heart disease in a patient, comprising determining the DNA methylation profile in a patient sample comprising genomic DNA from heart cells, heart tissue or peripheral blood; and comparing the DNA methylation profile in the patient sample with the DNA methylation profile from a normal subject not having a heart disease or having a normal heart function. The present invention furthermore relates to kits that are suitable for the methods and uses of the invention. The present invention furthermore relates to the use of ADORA2A, ERBB3, LY75, HOXB13, GF11, CLDN4, FDX1, ID4, NAT1, PPARGC1A, SULF2, TFF1, TKT, AT-P2C, CCDC59, GSTM5m, SLC9A6 and TDG as marker for the diagnosis, prognosis and/or therapy monitoring of a heart disease in a patient.

[0001] The present invention relates to the use of DNA methylation profiles of patient samples for the diagnosis, prognosis and/or therapy monitoring of a heart disease in a patient, wherein the DNA methylation profile of the patient sample is compared with the DNA methylation profile of a control sample, and wherein a difference in the DNA methylation profile of the patient sample compared to the control sample is indicative of a heart disease or of the risk for developing a heart disease or for a prediction of therapy effects or therapy outcome. The present invention further relates to methods for the diagnosis, prognosis and/or therapy monitoring of a heart disease in a patient, comprising determining the DNA methylation profile in a patient sample comprising genomic DNA from heart cells, heart tissue or peripheral blood; and comparing the DNA methylation profile in the patient sample with the DNA methylation profile from a normal subject not having a heart disease or having a normal heart function. The present invention furthermore relates to kits that are suitable for the methods and uses of the invention. The present invention furthermore relates to the use of ADORA2A, ERBB3, LY75, HOXB13, GFI1, CLDN4, FDX1, ID4, NAT1, PPARGC1A, SULF2, TFF1, TKT, ATP2C, CCDC59, GSTM5m, SLC9A6 and TDG as marker for the diagnosis, prognosis and/or therapy monitoring of a heart disease in a patient.

### BACKGROUND OF THE INVENTION

[0002] Cardiomyopathy is the deterioration of the function of the myocardium for any reason. People with cardiomyopathy are at risk of heart failure, arrhythmia and/or sudden cardiac death. Cardiomyopathy can often go undetected, making it especially dangerous to carriers of the disease. Cardiomyopathies can be categorized as extrinsic or intrinsic. An extrinsic cardiomyopathy is a cardiomyopathy where the primary pathology is outside the myocardium itself. Most cardiomyopathies are extrinsic, because by far the most common cause of a cardiomyopathy is ischemia. The World Health Organization calls these specific cardiomyopathies. An intrinsic cardiomyopathy is defined as weakness in the muscle of the heart that is not due to an identifiable external cause. This definition was used to categorize previously idiopathic cardiomyopathies although specific external causes have since been identified for many. The intrinsic cardiomyopathies consist of a variety of disease states, each with their own causes. Many intrinsic cardiomyopathies now have identifiable external causes including ischemia, drug and alcohol toxicity, viral infections and various genetic and idiopathic causes.

[0003] Dilated cardiomyopathy is one of the most frequent heart muscle diseases with an estimated prevalence of 1:2500. The progressive nature of this disorder is responsible for about 30-40% of all heart failure cases and is the main cause for heart transplantation in young adults. In the last decades, it was recognized that DCM has a substantial genetic contribution. It is estimated that about 30-40% of all DCM cases have a familial aggregation and until now more than 40 different genes were found to cause monogenetic DCM. However, since the course of the disease is highly variable and only a fraction of patients suffer a causal mutation, genetic modifiers are thought to play an important role (Friedrichs et al., 2009; Villard et al., 2011). Accordingly, several studies have now identified common genetic polymorphisms, which are associated with DCM or heart failure (Friedrichs et al., 2009; Villard et al., 2011). But even then, the existence of such modifiers also does not completely explain the high variability in phenotypic expression and unexplained cases of DCM.

[0004] Epigenetic mechanisms play important roles during normal development, aging and a variety of disease conditions. Numerous studies have implicated aberrant methylation in the etiology of human diseases, including cancer, MS and diabetes. Hypermethylation of CpG islands located in promoter regions of tumor suppressor genes is firmly established as the most frequent mechanism for gene activation in cancers.

[0005] Briefly, methylation of the 5′ carbon of cytosine is a form of epigenetic modification that does not affect the primary DNA sequence, but affects secondary interactions that play a critical role in the regulation of gene expression. Aberrant DNA methylation may suppress transcription and subsequently gene expression.

[0006] Disease modification through epigenetic alterations has been convincingly demonstrated for different diseases (Jones and Baylin, 2002; Feinberg and Tycko, 2004). In the cardiovascular system, histone modifications and chromatin remodelling are thought to direct adaptive as well as maladaptive molecular pathways in cardiac hypertrophy and failure (Montgomery et al., 2007) and DNA methylation was found to be responsible for the hypermutability of distinct cardiac genes (Meurs and Kuan, 2011). Furthermore, recent studies have highlighted the potential interplay between environmental factors and the disease phenotype by epigenetic mechanisms (Jirtle and Skinner, 2007; Herceg and Vaissiere, 2011). However, the knowledge about the impact of epigenetic alterations on the disease phenotype in human patients is still very limited.

[0007] Thus, epigenetic mechanisms are increasingly recognized as contributors to human disease. Surprisingly, most studies conducted so far have focused on cancer and only few have investigated the role of epigenetic mechanisms, especially DNA methylation in cardiovascular disease (Movassagh et al., 2011). However, epigenetic mechanisms are thought to control key processes such as cardiac hypertrophy, fibrosis and failure (Backs et al., 2006; Backs et al., 2008).

[0008] Furthermore, the decision to initiate or escalate therapies (drugs, devices, surgical interventions) is currently based on assumptions and supported only by few diagnostic measures (Bielecka-Dabrowa et al., 2008).

[0009] There is a need for diagnostic means and methods that not only allow the detection of a heart disease but also allow to draw conclusions about the further development of an existing heart disease or whether a heart disease will develop in a patient.

### SUMMARY OF THE INVENTION

[0010] According to the present invention this object is solved by the use of a DNA methylation profile of a patient sample comprising genomic DNA from heart cells, heart tissue or peripheral blood f for the diagnosis, prognosis and/or therapy monitoring of a heart disease in a patient, wherein the DNA methylation profile of the patient sample is compared with the DNA methylation profile of a control sample, and wherein a difference in the DNA methylation profile of the patient sample compared to the control sample is indicative of a heart disease or of the risk of developing a heart disease or for a prediction of therapy effects or therapy outcome.

[0011] According to the present invention this object is solved by a method f for the diagnosis, prognosis and/or therapy monitoring a heart disease in a patient, comprising
[0012] determining the DNA methylation profile in a patient sample comprising genomic DNA from heart cells, heart tissue or peripheral blood; and
[0013] comparing the DNA methylation profile in the patient sample with the DNA methylation profile from a normal subject not having a heart disease or having a normal heart function, wherein a difference in the DNA methylation profile is indicative of a heart disease or of the risk for developing a heart disease or for a prediction of therapy effects or therapy outcome.

[0014] According to the present invention this object is solved by providing a kit for the diagnosis, prognosis and/or therapy monitoring of a heart disease in a patient, comprising at least two sets of oligonucleotides, wherein the oligonucleotides of each set are identical, complementary or hybridize under stringent conditions to an at least 15 nucleotides long segment of a nucleic acid sequence selected from SEQ ID NOs. 1 to 18, and optionally, a reagent that distinguishes between methylated and non-methylated CpG dinucleotides.

[0015] According to the present invention this object is solved by providing at least one of ADORA2A, ERBB3, LY75, HOXB13, GFI1, CLDN4, FDX1, ID4, NAT 1, PPARGC1A, SULF2, TFF1, TKT, ATP2C, CCDC59, GSTM5m, SLC9A6 and TDG for use as a marker for the diagnosis, prognosis and/or therapy monitoring of a heart disease in a patient.

### DESCRIPTION OF THE PREFERRED EMBODIMENTS OF THE INVENTION

[0016] Before the present invention is described in more detail below, it is to be understood that this invention is not limited to the particular methodology, protocols and reagents described herein as these may vary. It is also to be understood that the terminology used herein is for the purpose of describing particular embodiments only, and is not intended to limit the scope of the present invention which will be limited only by the appended claims. Unless defined otherwise, all technical and scientific terms used herein have the same meanings as commonly understood by one of ordinary skill in the art. For the purpose of the present invention, all references cited herein are incorporated by reference in their entireties.

[0017] Concentrations, amounts, and other numerical data may be expressed or presented herein in a range format. It is to be understood that such a range format is used merely for convenience and brevity and thus should be interpreted flexibly to include not only the numerical values explicitly recited as the limits of the range, but also to include all the individual numerical values or sub-ranges encompassed within that range as if each numerical value and sub-range is explicitly recited. As an illustration, a numerical range of “at least 15 nucleotides, preferably 15 to 100” should be interpreted to include not only the explicitly recited values of 15 to 100, but also include individual values and sub-ranges within the indicated range. Thus, included in this numerical range are individual values such as 15, 16, 17, 18, 19, 20, 21, . . . 96, 97, 98, 99 and 100 and sub-ranges such as from 20 to 80, from 30 to 70, from 15 to 40, from 25 to 50, from 15 to 25, and from 25 to 50, etc. This same principle applies to ranges reciting only one numerical value. Furthermore, such an interpretation should apply regardless of the breadth of the range or the characteristics being described.

Use of DNA Methylation Profiles as Diagnostic, Prognostic and/or Therapeutic Marker of a Heart Disease

[0018] As described above, the present invention provides the use of a DNA methylation profile of a patient sample comprising genomic DNA from heart cells, heart tissue or peripheral blood for the diagnosis, prognosis and/or therapy monitoring of a heart disease in a patient.

[0019] Thereby, the DNA methylation profile of the patient sample is compared with the DNA methylation profile of a control sample.

[0020] A difference in the DNA methylation profile of the patient sample compared to the control sample is indicative:
[0021] of a heart disease,
[0022] of the risk of developing a heart disease,
[0023] of the progression or advance of a heart disease, and/or
[0024] for a prediction of therapy effects or therapy outcome.

[0025] As used herein, providing a diagnosis of a subject/patient is determining heart failure, namely independent on the etiology of the heart failure, i.e. determining whether or not a subject has suffered heart failure recently or in the past.

[0026] As used herein, providing a prognosis of a subject t/patient is preferably selected from determining heart failure severity, risk for subsequent all-cause mortality and risk assessment of the subject with heart failure or risk for developing heart failure.

[0027] “Risk assessment” or “risk stratification” of subjects or patients with heart failure according to the present invention refers to the evaluation of factors, such as DNA methylation profiles, mutations, biomarkers, in order to predict the risk of future events or even death and in order to decide about the type, manner, dosis, regimen of therapy and treatment for the individual subject.

[0028] “Disease classification” according to the present invention refers to the severity of the specific heart failure type.

[0029] Preferably, the prognosis of a heart disease comprises risk stratification and/or disease classification.

[0030] As used herein, “therapy monitoring” or “therapy management” of a heart disease comprises treatment monitoring or treatment decision making as well as the prediction of therapy effects or therapy outcome.

[0031] The “DNA methylation profile” according to the invention is preferably
[0032] a genome-wide DNA methylation profile,
[0033] a whole genome cardiac DNA methylation profile

[0034] The “DNA methylation profile” according to the invention preferably comprises the DNA methylation levels of CpG islands or nucleotides.

[0035] Preferably, the “DNA methylation profile” according to the invention is a genome-wide DNA methylation profile of the CpG islands or nucleotides.

[0036] The difference in the DNA methylation profile of the patient sample compared to the DNA methylation profile of the control sample is preferably
[0037] a different degree of CpG methylation.

[0038] CpG sites or CG sites are regions of DNA where a cytosine nucleotide occurs next to a guanine nucleotide in the linear sequence of bases along its length. “CpG” is shorthand for a cytosine and a guanine separated by only one phosphate, the “CpG” notation is used to distinguish this linear sequence from the CG base-pairing of cytosine and guanine. Cytosines in CpG dinucleotides can be methylated to form 5-methylcytosine. In mammals, methylating the cytosine within a gene can turn the gene off, a mechanism that is part of a larger field of science studying gene regulation that is called epigenetics. In mammals, 70% to 80% of CpG cytosines are methylated.

[0039] There are regions of the genome that have a higher concentration of CpG sites, known as CpG islands. Many genes in mammalian genomes have CpG islands associated with the start of the gene.

[0040] A “CpG island” as used herein and according to Takai and Jones (20002) is a region with:
[0041] a nucleotide length of at least 200 bp, or
[0042] with a GC percentage of 50% or higher, or
[0043] with an observed versus expected CpG ratio that is 60% or higher (where the observed/expected CpG ratio is calculated by formula: number of CpG/(number of C×number of G))×total number of nucleotides in the sequence).

[0044] CpG islands typically occur at or near the transcription start site of genes, particularly housekeeping genes, in vertebrates. Normally a C (cytosine) base followed immediately by a G (guanine) base (a CpG) is rare in vertebrate DNA because the cytosines in such an arrangement tend to be methylated. This methylation helps distinguish the newly synthesized DNA strand from the parent strand, which aids in the final stages of DNA proofreading after duplication. However, over evolutionary time methylated cytosines tend to turn into thymines because of spontaneous deamination. While there is a special enzyme in human (Thymine-DNA glycosylase, or TDG) that specifically replaces T's from T/G mismatches, it is not sufficiently effective to prevent the relatively rapid mutation of the dinucleotides. The result is that CpGs are relatively rare unless there is selective pressure to keep them or a region is not methylated for some reason, perhaps having to do with the regulation of gene expression.

[0045] Preferably, the DNA methylation profiles are determined by hybridisation-based arrays or by the use of next-generation sequencing techniques, polymerase-based as well as ligase based sequencing technologies like pyrosequencing, sequencing by ligation, single-molecule sequencing or nanopore sequencing alone or in combination with the bisulfite treatment of cytosine nucleotides.

[0046] Variation of the DNA Methylation Profiles in Time

[0047] In a preferred embodiment, the DNA methylation profile of the patient sample is determined over time.

[0048] This embodiment is preferably used for therapy monitoring or therapy management, preferably during/for long term therapy monitoring

[0049] The DNA methylation profile of the patient sample is determined at different time points, during therapy.

[0050] Thereby, the DNA methylation profile is preferably determined before or at the beginning of the therapy and is then determined at different time points during the therapy.

[0051] A change in the DNA methylation profile at these different time points, when compared to the DNA methylation profile of the first measured time point, can be an indication of the progression or advance of the heart disease in the patient and/or of the success of a therapy.

[0052] Assessment of Further Biomarkers or of Mutations

[0053] In an embodiment, further biomarkers and/or genetic mutations are determined in the patient sample.

[0054] Further biomarkers are, for example, well established metabolic biomarkes, e.g. troponins or NT-proBNP,

[0055] The determination of such further biomarkers and/or genetic mutations, together with the methylation profile, contributes preferably to disease risk stratification in a combinatorial manner.

[0056] The heart disease is a cardiomyopathy, myocardial insufficiency, acute or chronic heart failure,

such as dilated cardiomyopathy (DCM), hypertrophic cardiomyopathy (HCM), ischemic cardiomyopathy, diastolic dysfunction, myocardial infarction.

[0057] Cardiomyopathy, which literally means “heart muscle disease”, is the deterioration of the function of the myocardium for any reason. Cardiomyopathies can generally be categorized into two groups, based on WHO guidelines: extrinsic and intrinsic cardiomyopathies.

[0058] Extrinsic cardiomyopathies are cardiomyopathies where the primary pathology is outside the myocardium itself. Most cardiomyopathies are extrinsic, because by far the most common cause of a cardiomyopathy is ischemia. Ischemic cardiomyopathy, for instance, is a weakness in the muscle of the heart due to inadequate oxygen delivery to the myocardium with coronary artery disease being the most common cause.

[0059] An intrinsic cardiomyopathy is weakness in the muscle of the heart that is not due to an identifiable external cause. The term intrinsic cardiomyopathy does not describe the specific etiology of weakened heart muscle. The intrinsic cardiomyopathies are a heterogeneous group of disease states, each with their own causes. Intrinsic cardiomyopathy has a number of causes including drug and alcohol toxicity, certain infections (including hepatitis C), and various genetic and idiopathic (i.e., unknown) causes. There are four main types of intrinsic cardiomyopathy: first, dilated cardiomyopathy (DCM), the most common form, and one of the leading indications for heart transplantation. In DCM the heart (especially the left ventricle) is enlarged and the pumping function is diminished. Second, hypertrophic cardiomyopathy (HCM or HOCM), a genetic disorder caused by various mutations in genes encoding sarcomeric proteins. In HCM the heart muscle is thickened, which can obstruct blood flow and prevent the heart from functioning properly. Third, arrhythmogenic right ventricular cardiomyopathy (ARVC) arises from an electrical disturbance of the heart in which heart muscle is replaced by fibrous scar tissue. The right ventricle is generally most affected. Fourth, restrictive cardiomyopathy (RCM) is the least common cardiomyopathy. The walls of the ventricles are stiff, but may not be thickened, and resist the normal filling of the heart with blood. Furthermore, noncompaction cardiomyopathy a more recent form of cardiomyopathy is recognized as its own separate type since the 1980's. It refers to a cardiomyopathy where the left ventricle wall has failed to properly grow from birth and such has a spongy appearance when viewed during an echocardiogram.

[0060] The patient sample is preferably a sample of left ventricular tissue (such as a LV biopsy), a sample of right ventricular tissue or peripheral blood.

[0061] The control sample is preferably from a normal subject not having a heart disease or having a normal heart function, i.e. having an unaltered myocardial function.

[0062] The inventors have measured genome-wide DNA methylation profiles of (DCM) patient samples and identified candidate genes with altered methylation status that have prognostic and diagnostic value for heart diseases and are suitable for therapy monitoring as well.

[0063] In a preferred embodiment, the methylation level of at least one of the following genes is different in the patient sample compared to the control sample:

| | | Genebank Accession No. ** |
|---|---|---|
| adenosine receptor | SEQ ID NO. 1 | ENSG00000128271 |
| A2A (ADORA2A) | | |
| ERBB3 | SEQ ID NO. 2 | ENSG00000065361 |
| LY75 | SEQ ID NO. 3 | ENSG00000054219 |
| HOXB13 | SEQ ID NO. 4 | ENSG00000159184 |
| GFI1 | SEQ ID NO. 5 | ENSG00000162676 |
| CLDN4 | SEQ ID NO. 6 | ENSG00000189143 |
| FDX1 | SEQ ID NO. 7 | ENSG00000137714 |
| ID4 | SEQ ID NO. 8 | ENSG00000172201 |
| NAT1 | SEQ ID NO. 9 | ENSG00000171428 |
| PPARGC1A | SEQ ID NO. 10 | ENSG00000109819 |
| SULF2 | SEQ ID NO. 11 | ENSG00000196562 |
| TFF1 | SEQ ID NO. 12 | ENSG00000160182 |
| TKT | SEQ ID NO. 13 | ENSG00000163931 |
| ATP2C | SEQ ID NO. 14 | ENSG00000017260 |
| CCDC59 | SEQ ID NO. 15 | ENSG00000133773 |
| GSTM5m | SEQ ID NO. 16 | ENSG00000134201 |
| SLC9A6 | SEQ ID NO. 17 | ENSG00000198689 |
| TDG | SEQ ID NO. 18 | ENSG00000139372 |

** Ensembl Genebank (see www.ensembl.org)

[0064] All listed identifier and gene names and the corresponding gene sequences and gene related sequences like transcript and protein sequences were retrieved from the Ensembl database (http://www.ensembl.org) release 70 from January 2013. Which relates to either GRCh37.p10 (human) or Zv9 (zebrafish). The mentioned resources have also been used for primer design.

[0065] More preferably, the methylation level of at least one of ADORA2A, ERBB3 and LY75 is different in the patient sample compared to the control sample.

[0066] More preferably, the methylation level of at least one of LY75, ADORA2A, ERBB3 and HOXB13 is different in the patient sample compared to the control sample.

[0067] More preferably, the methylation level of at least one of LY75, ADORA2A, ERBB3, HOXB13 and GFI1 is different in the patient sample compared to the control sample

[0068] Preferably, the methylation level of at least one of ADORA2A, ERBB3, HOXB13, CLDN4, FDX1, ID4, NAT1, PPARGC1A, SULF2, TFF1 and TKT (SEQ ID NOs. 1, 2, 4, 6-13) is reduced in the patient sample compared to the control sample (hypo-methylation), more preferably of at least one of ADORA2A, ERBB3, HOXB13.

[0069] Preferably, the methylation level of at least one of LY75, GFI1, ATP2C, CCDC59, GSTM5m, SLC9A6 and TDG (SEQ ID NOs. 3, 5, 14-18) is higher in the patient sample compared to the control sample (hyper-methylation), more preferably of LY75.

[0070] LY75 is a collagen-binding mannose family receptor that is transcriptionally controlled by the Interleukin-6 receptor IL6Rα (Giridhar et al., 2011). For LY75, the dys-methylated CpGs reside within a classical CpG island covering Exon 1 as well as part of the 5′ upstream region. Its transcriptional start-site is predicted in very close vicinity (1,395 bp). Our findings of a significantly increased DNA methylation together with strongly reduced LY75-mRNA levels in DCM patients suggested a functional role. While it is to our knowledge not possible to recreate exactly the same methylation patterns in vitro as seen in the primary tissue, we could investigate here the functional consequence of global LY75 promoter methylation, suggesting a direct link between methylation and transcriptional activity. We also knocked down ly75 in the zebrafish model and find not only cardiac dysfunction in ly75-ablated embryos, but also a noticeable skin detachment phenotype, potentially due to disturbed collagen production.

[0071] The adenosine receptor A2A (ADORA2A) is a member of the G protein-coupled receptor family and is highly abundant in neurons of basal ganglia, T lymphocytes, platelets, and vasculature, but also shows relevant expression in myocardium as shown herein. In the heart, activation of ADORA2A enhances cAMP production through αGs proteins (Sommerschild et al., 2000) and overexpression results in increased contractility and sarcoplasmic reticulum Ca²⁺ uptake (Hamad et al., 2010) as well as cardio protection in ischemia and reperfusion damage (Urmaliya et al., 2009). Surprisingly, although ADORA2A methylation is reduced, we find mRNA levels to be significantly down-regulated. Hence, hyper-methylation can sometimes result in increased gene expression as observed in the case of ADORA2A. Our CGI annotation was based on the criteria by Takai and Jones (2002), which define a CpG island as a nucleotide sequence of 200 bp or greater in length or with a GC content of 50% or more, or a ratio of observed versus expected CpGs of 0.6 or higher. In case of ADORA2A, the tested CGIs only met the second criterion and may therefore not be classical CGIs.

[0072] The receptor tyrosine-protein kinase ERBB3 belongs to the membrane bound epidermal growth factor receptor (EGFR) family. Functionally it is implicated in SOX10 mediated neural crest and early heart development (Erickson et al., 1997). However, since knock-out of ERBB3 leads to early embryonic lethality, its role in regulation of cardiac contractility was previously unknown. In the present invention, the inventors used the zebrafish as animal model for investigating the functional role of ERBB3. Knock-down of erbb3b results in a similar, but earlier phenotype as adora2a. Additionally, erbb3b-morphants show regurgitation of blood into the ventricle, suggesting impaired cardiac valve development. cDNA splice-site analysis revealed a completely insertion of intron 2 as well a partial exclusion exon 2 producing an aberrant, frameshifted transcripts with premature termination codons.

[0073] The HOXB13 gene is a member of the homeobox gene family and is encoding a transcription factor. The homeobox gene family clusters on chromosome 17 in the 17qw21-22 region and is highly conserved and essential for vertebrate development.

Methods for the Diagnosis, Prognosis and/or Therapy Monitoring of a Heart Disease in a Patient

[0074] As described above, the present invention provides a method for the diagnosis, prognosis and/or therapy monitoring of a heart disease in a patient.

[0075] The method comprises
[0076] determining the DNA methylation profile in a patient sample comprising genomic DNA from heart cells, heart tissue or peripheral blood; and
[0077] comparing the DNA methylation profile in the patient sample with the DNA methylation profile from a normal subject not having a heart disease or having a normal heart function.

[0078] As described above, a difference in the DNA methylation profile of the patient sample compared to the control sample is indicative:
[0079] of a heart disease,
[0080] of the risk of developing a heart disease, and/or
[0081] for a prediction of therapy effects or therapy outcome.

[0082] The method furthermore preferably comprising the step of
[0083] contacting genomic DNA isolated from the patient sample with at least one reagent that distinguishes between methylated and non-methylated CpG dinucleotides.

[0084] Reagents that distinguish between methylated and non-methylated CpG dinucleotides are known in the art, such as bisulfite, hydrogen sulfite, disulfite, and combinations thereof.

[0085] In a preferred embodiment, the DNA methylation profile of the patient sample is determined over time at different time points, preferably during therapy monitoring, as described above.

[0086] Preferably, the DNA methylation profiles are determined by hybridisation-based arrays or by the use of next-generation sequencing techniques, polymerase-based as well as ligase based sequencing technologies like pyrosequencing, sequencing by ligation, single-molecule sequencing or nanopore sequencing alone or in combination with the bisulfite conversion/treatment of cytosine nucleotides.

[0087] As described above, the heart disease is a cardiomyopathy, myocardial insufficiency, acute or chronic heart failure,

such as dilated cardiomyopathy (DCM), hypertrophic cardiomyopathy (HCM), ischemic cardiomyopathy, diastolic dysfunction, myocardial infarction.

[0088] The patient sample is preferably a sample of left ventricular tissue (such as a LV biopsy), a sample of right ventricular tissue or peripheral blood.

[0089] The control sample is preferably from a normal subject not having a heart disease or having a normal heart function, i.e. having an unaltered myocardial function.

[0090] As described above, the prognosis of a heart disease preferably comprises risk stratification and/or disease classification.

[0091] As described above, the therapy monitoring of a heart disease preferably comprises treatment monitoring or treatment decision making as well as the prediction of therapy effects or therapy outcome.

[0092] The inventors have measured genome-wide DNA methylation profiles of (DCM) patient samples and identified candidate genes with altered methylation status that have prognostic and diagnostic for heart diseases and are suitable for therapy monitoring as well.

[0093] In a preferred embodiment, the methylation level of at least one of the following genes is different in the patient sample compared to the control sample:

| | | Genebank Accession No. ** |
|---|---|---|
| adenosine receptor | SEQ ID NO. 1 | ENSG00000128271 |
| A2A (ADORA2A) | | |
| ERBB3 | SEQ ID NO. 2 | ENSG00000065361 |
| LY75 | SEQ ID NO. 3 | ENSG00000054219 |
| HOXB13 | SEQ ID NO. 4 | ENSG00000159184 |
| GFI1 | SEQ ID NO. 5 | ENSG00000162676 |
| CLDN4 | SEQ ID NO. 6 | ENSG00000189143 |
| FDX1 | SEQ ID NO. 7 | ENSG00000137714 |
| ID4 | SEQ ID NO. 8 | ENSG00000172201 |
| NAT1 | SEQ ID NO. 9 | ENSG00000171428 |
| PPARGC1A | SEQ ID NO. 10 | ENSG00000109819 |
| SULF2 | SEQ ID NO. 11 | ENSG00000196562 |
| TFF1 | SEQ ID NO. 12 | ENSG00000160182 |
| TKT | SEQ ID NO. 13 | ENSG00000163931 |
| ATP2C | SEQ ID NO. 14 | ENSG00000017260 |
| CCDC59 | SEQ ID NO. 15 | ENSG00000133773 |
| GSTM5m | SEQ ID NO. 16 | ENSG00000134201 |
| SLC9A6 | SEQ ID NO. 17 | ENSG00000198689 |
| TDG | SEQ ID NO. 18 | ENSG00000139372 |

** Ensembl Genebank (see www.ensembl.org)

[0094] All listed identifier and gene names and the corresponding gene sequences and gene related sequences like transcript and protein sequences were retrieved from the Ensembl database (http://www.ensembl.org) release 70 from January 2013. Which relates to either GRCh37.p10 (human) or Zv9 (zebrafish). The mentioned resources have also been used for primer design.

[0095] More preferably, the methylation level of at least one of ADORA2A, ERBB3 and LY75 is different in the patient sample compared to the control sample.

[0096] More preferably, the methylation level of at least one of ADORA2A, ERBB3, HOXB13 and LY75 is different in the patient sample compared to the control sample.

[0097] More preferably, the methylation level of at least one of LY75, ADORA2A, ERBB3 and HOXB13 is different in the patient sample compared to the control sample.

[0098] More preferably, the methylation level of at least one of LY75, ADORA2A, ERBB3, HOXB13 and GFI1 is different in the patient sample compared to the control sample

[0099] Preferably, the methylation level of at least one of ADORA2A, ERBB3, HOXB13, CLDN4, FDX1, ID4, NAT1, PPARGC1A, SULF2, TFF1 and TKT (SEQ ID NOs. 1, 2, 4, 6-13) is reduced in the patient sample compared to the control sample (hypo-methylation), more preferably at least one of ADORA2A, ERBB3, HOXB13.

[0100] Preferably, the methylation level of at least one of LY75, GFI1, ATP2C, CCDC59, GSTM5m, SLC9A6 and TDG (SEQ ID NOs. 3, 5, 14-18) is higher in the patient sample compared to the control sample (hyper-methylation), more preferably of LY75.

Kits for the Diagnosis, Prognosis and/or Therapy Monitoring of a Heart Disease in a Patient

[0101] As described above, the present invention provides a kit for the diagnosis, prognosis and/or therapy monitoring of a heart disease in a patient.

[0102] The kit comprises at least two sets of oligonucleotides, wherein the oligonucleotides of each set are identical, complementary or hybridize under stringent conditions to an at least 15 nucleotides long segment of a nucleic acid sequence selected from SEQ ID NOs. 1 to 18, preferably 15 to 100 nucleotides long segment of a nucleic acid sequence selected from SEQ ID NOs. 1 to 18, such as 20 to 80 or 30 to 70, such as about 25 nucleotides.

[0103] The kit optionally comprises a reagent that distinguishes between methylated and non-methylated CpG dinucleotides.

[0104] The kit is preferably suitable for the use of/with/in hybridisation-based arrays or next-generation sequencing techniques, polymerase-based as well as ligase based sequencing technologies, like pyrosequencing, sequencing by ligation, single-molecule sequencing or nanopore sequencing alone or in combination with the bisulfite treatment/conversion of cytosine nucleotides.

[0105] Thus, the kit comprises at least two sets of oligonucleotides for the detection of two target nucleic acids/genes (selected from SEQ ID NOs. 1 to 18).

[0106] Reagents that distinguish between methylated and non-methylated CpG dinucleotides are known in the art, such as bisulfite, hydrogen sulfite, disulfite, and combinations thereof.

[0107] As described above, the prognosis of a heart disease preferably comprises risk stratification and/or disease classification.

[0108] As described above, the therapy monitoring of a heart disease preferably comprises treatment monitoring or treatment decision making as well as the prediction of therapy effects or therapy outcome.

### Markers for Heart Diseases

[0109] As described above, the present invention provides the use of at least one of ADORA2A, ERBB3, LY75, HOXB13, GFI1, CLDN4, FDX1, ID4, NAT1, PPARGC1A, SULF2, TFF1, TKT, ATP2C, CCDC59, GSTM5m, SLC9A6 and TDG as marker for the diagnosis, prognosis and/or therapy monitoring of a heart disease in a patient.

| | | Genebank Accession No. ** |
|---|---|---|
| adenosine receptor | SEQ ID NO. 1 | ENSG00000128271 |
| A2A (ADORA2A) | | |
| ERBB3 | SEQ ID NO. 2 | ENSG00000065361 |
| LY75 | SEQ ID NO. 3 | ENSG00000054219 |
| HOXB13 | SEQ ID NO. 4 | ENSG00000159184 |
| GFI1 | SEQ ID NO. 5 | ENSG00000162676 |
| CLDN4 | SEQ ID NO. 6 | ENSG00000189143 |
| FDX1 | SEQ ID NO. 7 | ENSG00000137714 |
| ID4 | SEQ ID NO. 8 | ENSG00000172201 |
| NAT1 | SEQ ID NO. 9 | ENSG00000171428 |
| PPARGC1A | SEQ ID NO. 10 | ENSG00000109819 |
| SULF2 | SEQ ID NO. 11 | ENSG00000196562 |
| TFF1 | SEQ ID NO. 12 | ENSG00000160182 |
| TKT | SEQ ID NO. 13 | ENSG00000163931 |
| ATP2C | SEQ ID NO. 14 | ENSG00000017260 |
| CCDC59 | SEQ ID NO. 15 | ENSG00000133773 |
| GSTM5m | SEQ ID NO. 16 | ENSG00000134201 |
| SLC9A6 | SEQ ID NO. 17 | ENSG00000198689 |
| TDG | SEQ ID NO. 18 | ENSG00000139372 |

** Ensembl Genebank (see www.ensembl.org)

[0110] All listed identifier and gene names and the corresponding gene sequences and gene related sequences like transcript and protein sequences were retrieved from the Ensembl database (http://www.ensembl.org) release 70 from January 2013. Which relates to either GRCh37.p10 (human) or Zv9 (zebrafish). The mentioned resources have also been used for primer design.

[0111] In a preferred embodiment at least one of ADORA2A, ERBB3 and LY75 are used as such a marker.

[0112] In a preferred embodiment at least one of LY75, ADORA2A, ERBB3 and HOXB13 are used as such a marker.

[0113] In a preferred embodiment at least one of LY75, ADORA2A, ERBB3, HOXB13 and GFI1 are used as such a marker.

[0114] Preferably, the use of said (target) genes, nucleic acids or polypeptides encoded by the genes/nucleus acids as biomarkers comprises determining the methylation level of at least one of SEQ ID NOs. 1-18 in a patient sample comprising genomic DNA from heart cells, heart tissue or peripheral blood; and comparing it with the methylation level from a normal subject not having a heart disease, wherein, and as described above, a difference in the DNA methylation profile is indicative of a heart disease or of the risk for developing a heart disease or for a prediction of therapy effects or therapy outcome.

[0115] Preferably, and as described above, the heart disease is a cardiomyopathy, myocardial insufficiency, heart failure (acute or chronic),

such as DCM dilated cardiomyopathy (DCM), hypertrophic cardiomyopathy (HCM), ischemic cardiomyopathy, diastolic dysfunction, myocardial infarction.

[0116] Preferably, and as described above, the patient sample is a sample of left ventricular tissue, right ventricular tissue or peripheral blood.

[0117] Preferably, and as described above, the control sample is from a normal subject not having a heart disease or having a normal heart function.

[0118] As described above, the prognosis of a heart disease preferably comprises risk stratification and/or disease classification.

[0119] As described above, the therapy monitoring of a heart disease preferably comprises treatment monitoring or treatment decision making as well as the prediction of therapy effects or therapy outcome.

### FURTHER DESCRIPTION OF THE INVENTION

### Summary

[0120] Problem: Dilated cardiomyopathy (DCM) is one the most frequent heart muscle diseases. Although several factors including genetic mechanisms are found to cause DCM, we still find many cases unexplained and observe a high phenotypic variability with respect to disease severity and prognosis. Epigenetic mechanisms are increasingly recognized as causes and modulators of human disease. Therefore, we studied genome-wide cardiac DNA methylation in DCM patients and controls to detect a possible epigenetic contribution to DCM.

[0121] Results: We detected distinct DNA methylation patterns in left ventricular heart tissue of DCM patients and replicated the epigenetic mode of regulation for several genes with previously unknown function in DCM, namely Lymphocyte antigen 75 (LY75), Tyrosine kinase-type cell surface receptor HER3 (ERBB3), Homeobox B13 (HOXB13), and Adenosine receptor A2A (ADORA2A). The results were carefully verified by alternative techniques in a well phenotyped and large independent cohort of DCM patients and controls. Furthermore, we are able to show the functional relevance for the contribution of the identified genes in the pathogenesis of heart failure by using the zebrafish as an in vivo model.

[0122] Impact: Our results hint at a novel layer in the pathogenesis of DCM and heart failure and have an impact on the development of novel biomarkers and future therapeutic strategies.

### Discussion

[0123] In the present study, genome-wide cardiac DNA methylation was examined for the first time in patients with idiopathic DCM and controls. We detected methylation differences in pathways related to heart disease, but also in genes with yet unknown function in DCM or heart failure, namely Lymphocyte antigen 75 (LY75), Tyrosine kinase-type cell surface receptor HER3 (ERBB3), Homeobox B13 (HOXB13), and Adenosine receptor A2A (ADORA2A). Mass-spectrometric analysis and bisulfate-sequencing enabled confirmation of the observed DNA methylation changes in independent cohorts. Aberrant DNA methylation in DCM patients was associated with significant changes in LY75 and ADORA2A mRNA expression, but not in ERBB3 and HOXB13. By in vivo studies of orthologous ly75 and adora2a in zebrafish, we could demonstrate for the first time a functional role of these genes in adaptive or maladaptive pathways in heart failure.

[0124] In detail, we investigated here DNA methylation patterns on a genome-wide level in myocardium from patients with idiopathic DCM and functionally unaffected hearts of patients who had received heart transplantation. We found and confirmed aberrant DNA methylation alterations in a number of CGIs, suggesting that DNA methylation is associated with cardiac function and may modulate phenotypic characteristics of idiopathic DCM.

[0125] Recently, Movassagh et al. (2011) reported distinct epigenomic features in explanted human failing hearts, highlighting a potential role of DNA methylation also in end-stage heart failure. However, feasibility of the used methyl-DNA precipitation and sequencing is restricted by the relatively large amounts of required tissue, which is not easily available from living patients.

[0126] Furthermore, handling of the tissue and time points of DNA isolation were quite different in controls and patients. Tissue specimens from explanted hearts of end-stage heart failure patients may be altered due to tissue handling and could have undergone secondary alterations because of degradation, missing oxygenation, innervation, and arrest of pumping function (Talens et al., 2010). Also, the authors did not replicate their findings, which were obtained in 4 patients, in an independent series of unrelated samples and by an alternative methodology. Therefore, we used a different approach, confirmed our findings in a large replication cohort with two alternative methodologies and applied functional studies to underscore the relevance of our results.

[0127] Since availability of appropriate myocardial tissue from living patients is limited, studies on epigenetic alterations in patients with heart disease are rare. As a primary referral center for cardiomyopathies, we could enroll a high number of patients and controls in this study. Our controls are not completely healthy, but had previously received heart transplantation. Hence, potential confounders include patient's medication and medical history. Importantly, on the functional level all controls had an unconstrained cardiac function as a prerequisite and we could apply the exactly same standardized procedure to sample and process left ventricular biopsies from DCM patients and controls. However, all controls received immunosuppressive medications to prevent organ rejection. This medication might influence on at least some genes. As shown herein, we found unchanged methylation levels for the tested genes in control subjects before and after heart transplantation, showing that immunosuppressives do not, at least in whole peripheral blood, impact on CGI DNA methylation of LY75, ADORA2A, ERBB3 and HOXB13.

[0128] Tissue samples are composed of different cell types, which might change during disease progression. In the present study, we have paid special attention to patient selection and the process of tissue sampling. Consequently, this resulted in high homogeneity of overall methylation patterns as shown above. In a study by Grzeskowiak et. al (2003) it was demonstrated that differences in gene expression of LV myocardial biopsies from controls and idiopathic DCM patients are almost exclusively due to genes expressed in cardiomyocytes and that the contribution of the second most common cell type, fibroblasts, is rather low and mostly unchanged during DCM. The increased fibrosis observed in human DCM, for instance, seems to be mainly due to extracellular collagen deposition rather than an increase of cardiofibroblasts. Our in vivo experiments clearly underline that reduced expression of LY75 and ADORA2A in cardiomyocytes leads to heart failure as observed in our patients. Together, this approach allowed us to study epigenetic mechanisms and its functional consequences without the confounding background of organ hypoxia and apoptosis in explanted hearts of deceased patients.

[0129] In a funnel approach, we first investigated global methylation patterns and found that methylation patterns also reflect cardiac disease pathways. Our global methylation analyses identified cardiac disease pathways and were complemented by extensive validation studies applying the highly precise MassARRAY and bisulfite sequencing techniques. We found 12 of 20 genes showing the same direction of dys-methylation as found in the screening stage, and four reached statistical significance. This has at least three reasons: 1) we expected a high false positive rate due to the relatively small screening cohorts in contrast to the number of measured epigenetic features, 2) we performed the replication measurements with a completely independent methodology, and 3) we carried out these analyses in independent patients and controls. Therefore, the genes identified here represent consistently validated targets that show an epigenetic mode of regulation.

[0130] The deciphering of the functional implications of changes in DNA methylation is difficult but of pivotal importance. Since in many cases changes in CpG methylation are correlated to the accessibility of DNA to transcription factors and polymerases, measurements of mRNA levels represent an appropriate methodology. In the present study, we find that methylation of novel cardiac genes is altered in patients with DCM. Hence, it can be hypothesized that the dys-methylated and dys-regulated genes also exert a functional role in the heart.

[0131] The receptor tyrosine-protein kinase ERBB3 belongs to the membrane bound epidermal growth factor receptor (EGFR) family. Functionally it is implicated in SOX10 mediated neural crest and early heart development (Erickson et al., 1997). However, since knock-out of ERBB3 leads to early embryonic lethality, its role in regulation of cardiac contractility was previously unknown. Although we could not observe changes in ERBB3 transcript levels, the significant changes in DNA methylation could be a susceptibility factor mediated through yet unknown pathways, e.g. by exerting effects on DNA stability, ERBB3 isoform expression, or Histon binding.

[0132] LY75, a collagen-binding mannose family receptor, is transcriptionally controlled by the Interleukin-6 receptor IL6Rα (Giridhar et al., 2011) and mediates antigen uptake and presentation in a Clathrin-dependent manner. For DCM, a correlation of IL-6 levels and cross-linked type I collagen was found, potentially implicating a role of IL-6/LY75 signaling in cardiac remodeling (Timonen et al., 2008). For LY75, the dys-methylated CpGs reside within a classical CpG island covering Exon 1 as well as part of the 5′ upstream region. Its transcriptional start-site is predicted in very close vicinity (1,395 bp). Our findings of a significantly increased DNA methylation together with strongly reduced LY75-mRNA levels in DCM patients suggested a functional role. While it is to our knowledge not possible to recreate exactly the same methylation patterns in vitro as seen in the primary tissue, we could investigate here the functional consequence of global LY75 promoter methylation, suggesting a direct link between methylation and transcriptional activity. We also knocked down ly75 in the zebrafish model and find not only cardiac dysfunction in ly75-ablated embryos, but also a noticeable skin detachment phenotype, potentially due to disturbed collagen production.

[0133] The adenosine receptor A2A (ADORA2A) is a member of the G protein-coupled receptor family and is highly abundant in neurons of basal ganglia, T lymphocytes, platelets, and vasculature, but also shows relevant expression in myocardium as shown herein. In the heart, activation of ADORA2A enhances cAMP production through αGs proteins (Sommerschild et al., 2000) and overexpression results in increased contractility and sarcoplasmic reticulum Ca²⁺ uptake (Hamad et al., 2010) as well as cardio protection in ischemia and reperfusion damage (Urmaliya et al., 2009). Surprisingly, although ADORA2A methylation is reduced, we find mRNA levels to be significantly down-regulated. Such a positive relationship was described for other genes and is not fully understood in each case (Zhang et al., 2006). Our CGI annotation was based on the criteria by Takai and Jones (2002), which define a CpG island as a nucleotide sequence of 200 bp or greater in length or with a GC content of 50% or more, or a ratio of observed versus expected CpGs of 0.6 or higher. In case of ADORA2A, the tested CGIs only met the second criterion and may therefore not be classical CGIs.

[0134] For such sites, one explanation can be that hyper-methylation cannot only impede the binding of transcriptional activators but also can affect repressors of transcription. We therefore performed an in silico analysis of the promoter region of ADORA2A and found two binding-sites of the transcription factor CTCF (CCCTC-binding factor) in close vicinity to both significantly hypo-methylated CGIs, but not within the single unaffected CGI of ADORA2A. CTCF is a unique insulator-binding protein, which can act as transcriptional repressor by blocking distinct enhancer regions (Bell et al., 1999; Gaszner and Felsenfield, 2006). Intriguingly, CTCF sites emerge as central players in regulatory networks linking gene regulation with epigenetic modifications (Bell and Felsenfield, 2000). Accordingly, our observed decrease in ADORA2A expression might be a result of enhanced binding of CTCF-repressors due to CGI hypomethylation. One explanation is that hyper-methylation cannot only silence the binding of transcriptional activators, but also affect repressors of transcription. Hence, hyper-methylation can sometimes result in increased gene expression as observed in the case of ADORA2A.

[0135] The detection of epigenetic mechanisms in human heart disease represents an attractive option to identify and dissect and later in target completely novel pathomechanisms. Hence, the validated targets from this study that have shown functional relevance are most likely modifiers of DCM rather than being independent disease causes and can, thus, can be further investigated for their diagnostic and therapeutic potential. Therefore, it is reasonable to investigate their potential as diagnostic and therapeutic targets specifically in DCM but also in heart failure due to other causes. In the cancer field, epigenetic drugs have already entered the clinical arena (e.g. Decitabine or Azacitidine in the treatment of myelodysplastic syndromes), and methylation patterns are used as biomarkers to subtype and stage various cancers as a critical step towards a more effective personalized care (Coppede 2011; Litzow 2011). Hence, the genes identified here are relevant druggable targets in DCM and heart failure and aid in disease classification or risk stratification.

[0136] The following examples and drawings illustrate the present invention without, however, limiting the same thereto.

### BRIEF DESCRIPTION OF THE DRAWINGS

[0137] FIG. 1 Detection of DNA methylation patterns.

[0138] A) Correlation plot showing the percentage of CpG methylation in controls versus DCM patients resulting in an overall very high correlation. Overall, correlation between both cohorts is high, however some outliers show hyper- or hypo-methylation in cases.

[0139] B) Gene-Set Enrichment Analysis for NIA human disease pathways. The area proportional Venn diagram shows that methylation changes in cardiovascular disease genes are significantly enriched together with the overlap of the other indicated gene sets.

[0140] C) Cluster analysis for genes with known expression in the human heart and significantly altered methylation. The color code used for the heatmap is shown in the upper left corner, values range from 1 (sample with the lowest methylation for the considered gene) to 17 (sample with the highest methylation for the considered genes). Genes with higher methylation found in controls cluster in the upper right quarter. Genes with higher methylation in DCM gather in the lower left quarter. Hypomethylation is shown for genes clustering in the upper left quarter for DCM and lower right quarter for controls.

[0141] FIG. 2 Differentially methylated genes in DCM patients.

[0142] A-C) Bar graphs showing the degree of methylation of CGIs of the screening cohort (n=9 DCM patients; n=8 controls). The 5 genes with the largest increase in methylation in DCM patients are shown in A) and genes with the largest decrease in methylation are displayed in B). C) Shown are the 20 genes with the most significant methylation changes in the screening phase. Error bars indicating standard deviation.

[0143] FIG. 3 MassARRAY-based validation of dys-methylated genes.

[0144] A and B) MassARRAY-based validation of differential methylation in LY75 and ERBB3. DCM patients show significantly increased DNA methylation in LY75 (A), while ERBB3 is significantly lower methylated (B). The schemes above the methylation graphs represent the tested CGIs (CGI-1, CGI-2, CGI-3), in relation to the predicted transcription start-site (leftmost vertical line), the exons (black bars) and alternatively spliced exons (white boxes) of the genes. A) The box and whiskers plot (min to max) on the upper left side represents the mean CpG methylation measured by MassARRAY, the individual CpG methylation is shown at the bottom. The pattern of CpG methylation in multiple clones is shown on the upper right insert. B) The box and whiskers plot (min to max) on the left side represents the mean CpG methylation measured by MassARRAY, the individual CpG methylation is shown on the right.

[0145] C and D) MassARRAY-based validation of differential methylation in HOXB13 and ADORA2A.

[0146] DCM patients show significantly decreased DNA methylation in HOXB13 (A) and ADORA2A (B). A) The box and whiskers plot (min to max) on the left side represents the mean CpG methylation measured by MassARRAY, the individual CpG methylation is shown on the right. B) The scheme above the graph represents the tested CGI, in relation to the predicted transcription start site (leftmost vertical line), the exons (black boxes) and alternatively spliced exons (white boxes) of adora2a. Dashed lines indicate the 1500 bp up- and downstream region of the CGIs wherein the listed transcription factor binding sites are found. Boxplots below show the mean methylation in DCM and controls at the corresponding CGI. The pattern of CpG methylation as assessed by bisulfite-sequencing in multiple clones is shown for CGI-1 at the bottom of the figure.

[0147] (E) MassARRAY-based validation of differential methylation in ADORA2A. Graph representing individual CpG methylation in ADORA2A measured by MassARRAY in DCM patients and controls.

[0148] FIG. 4 MassARRAY-based validation of further dys-methylated genes.

[0149] Graphs representing the mean CGI methylation of targets included in the replication stage. DCM patients show a reduction in methylation level in CLDN4, FDX1, ID4, NAT1, PPARGC1A, SULF2, TFF1, TKT, FLJ20701 and an increase of methylation in ATP2C, CCDC59, GFI1, GSTM5m, SLC9A6, and TDG.

[0150] FIG. 5 CpG island methylation of control subjects before and after heart transplantation.

[0151] The line diagram shows the highly similar degree of methylation of DNA derived from peripheral blood of control subjects pre- (circlescattered line) and post- (squaresscattered line) heart transplantation (n=11) for LY75, ADORA2A, ERBB3 and HOXB13. Error bars indicating standard deviation.

[0152] FIG. 6 mRNA Expression of genes with altered methylation status and gene promoter analysis.

[0153] A-C) Bar graphs showing relative mRNA expression levels of LY75, ERBB3 and ADORA2A in mild and moderate-severe DCM in comparison to controls. A) LY75 expression is strongly reduced (relative expression=0.04), while ERBB3 (B) mRNA levels are not differentially regulated. C) ADORA2A is also significantly down-regulated in DCM (relative expression=0.37).

[0154] D) Given are the mean delta-CT values (±SEM) of LY75, ERBB3, and ADORA2A in the different groups (controls, moderate DCM, severe DCM). The reference is based on the mean of the three housekeeper genes: GAPDH, RPL13, β-Actin.

[0155] E) Left: Schema of the vector construct to measure LY75 promoter activity without and after treatment with the methylase SssI. Right: Relative promoter activity (mean of 3 technical replicates ±SD) showing the strongly reduced activity in LY75 after methylation, whereas the negative control does not show significant differences.

[0156] FIG. 7 ly75 and adora2a tissue and cell-type expression.

[0157] A) Relative expression levels of ly75 and adora2a quantified by q-PCR in 40 whole zebrafish embryos (grey bars) and 200 isolated zebrafish embryonic hearts (black bars). B-C) Expression of ly75 and adora2a in neonatal rat cardiomyocytes and cardiofibroblasts (n=3 biological replicates). Error bars indicating standard deviation.

[0158] FIG. 8 ly75 is essential to maintain cardiac contractility.

[0159] A) mRNA antisense in situ hybridization showing that ly75 is significantly expressed in the zebrafish heart. B, C) Lateral views of MO3-control (B) and MO-ly75 (C) injected embryos at 72 hpf. After depletion of ly75, which can be monitored by cDNA splice-analysis (D), zebrafish hearts show reduced contractile force (E) and precardial blood congestion (arrowhead) as sign of manifest heart failure. Ly75-morphants also show noticeable skin detachment most pronounced in the head/eye region (C).

[0160] F) Molecular chamber definition is not impaired in ly75-morphants compared to the control-injected zebrafish as demonstrated by regular amhc, vmhc, MF20, and S46 expression. hpf=hours post fertilization; amhc=atrial myosin heavy-chain; vmhc=ventricular myosin heavy-chain; A=atrium; V=ventricle. Error bars indicating standard deviation.

[0161] FIG. 9 Loss-of adora2a leads to heart failure in zebrafish.

[0162] A) Amino acid sequence alignments of human (h), mouse (m) and zebrafish (z) ADORA2A demonstrating its high cross-species homology. Black boxes indicate amino acid identity, gray boxes indicate amino acids with similar chemical properties. B) Adora2A is significantly expressed in the zebrafish heart. C, D) Lateral view of MO2-control (B), and MO-adora2a (C) injected embryos at 72 hpf. After injection of MO-adora2a, 66% of morphant embryos develop progressive heart failure and deterioration in ventricular contractility measured by fractional shortening (E) at the indicated developmental stages. Error bars indicating standard deviation.

[0163] F) Molecular chamber definition is not impaired in adora2a-morphants compared to the control-injected zebrafish as demonstrated by regular amhc and vmhc expression.

[0164] FIG. 10 Protein conservation of LY75.

[0165] Amino acid sequence alignments of human (h), mouse (m) and zebrafish (z) LY75 demonstrating its cross-species homology. Black boxes indicate amino acid identity, gray boxes indicate amino acids with similar chemical properties.

### EXAMPLES

### 1. Materials and Methods

### 1.1 Patients and Controls

[0166] The study was conducted in accordance with the principles of the Declaration of Helsinki. All participants of the study have given written informed consent and the study was approved by the ethic committees. DCM was diagnosed according to the guidelines of the World Health Organization (WHO). Inclusion criteria for DCM cases were the presence of reduced left ventricular systolic function (left ventricular ejection fraction <45% assessed by echocardiography) in the absence of relevant coronary artery disease (CAD) as determined by coronary angiography. Patients with valvular or hypertensive heart disease, history of myocarditis, regular alcohol consumption or cardio-toxic chemotherapy were also excluded. The control biopsy specimens were obtained from patients who had received heart transplantation. All patients of the control cohort had successful cardiac transplantation more than 6 months ago with normal systolic and diastolic function and no evidence for relevant vasculopathy as judged by coronary angiography. Furthermore, all controls showed freedom from relevant acute or chronic organ rejection.

### 1.2 Processing of Left Ventricular Biopsies

[0167] Biopsy specimens were obtained from the apical part of the free left ventricular wall (LV) from DCM patients or cardiac transplant patients (controls) undergoing cardiac catheterization using a standardized protocol. Biopsies were washed with NaCl (0.9%) and immediately transferred and stored in liquid nitrogen until DNA or RNA was extracted. DNA was extracted using the DNeasy blood and tissue kit, total RNA using the RNeasy kit according to the manufacturer's protocol (Qiagen, Germany). RNA purity and concentration were determined using the Bioanalyzer 2100 (Agilent Technologies, Berkshire, UK) with a Eukaryote Total RNA Pico assay chip. Since a critical issue for the reliability of gene expression analysis is the quality of the RNA samples, a RNA integrity number (RIN)>6 was defined as minimum requirement for further analyses.

### 1.3 DNA Methylation Profiling and Fine-Mapping

[0168] For measuring methylation profiles, we used the Infinium HumanMethylation 27 BeadChip assay from Illumina with 1000 ng DNA per sample. The procedure followed the manufacturers standard workflow, starting with the bisulfite treatment of the sample DNA leading to a conversion of unmethylated cytosins to uracil, while 5-methylcytosines remain unchanged. After amplification and fragmentation of the bisulfite-converted DNA, they were hybridized to the Infinium BeadChips.

### 1.4 DNA Methylation Validation by MassARRAY

[0169] DNA methylation was validated by the MassARRAY technique as previously described (Ehrich et al., 2005). Briefly, 400-500 ng genomic DNA was chemically modified with sodium bisulfite using the EZ methylation kit (Zymo Research) according to the manufacturer's instructions. The bisulfite-treated DNA was PCR-amplified by primers designed to cover the Infinium probes that showed differential methylation at each locus. The amplicons were transcribed by T7 polymerase, followed by T specific-RNAase-A cleavage. The digested fragments were quantified by MALDI-TOF-based technique. The primer sequences are given in Table 1. DNA methylation standards (0%, 20%, 40%, 60%, 80%, and 100% methylated genomic DNA) were used to confirm the unbiased amplification of the amplicons. For LY75 and ADORA2A we additionally generated 14 and 12 clones, respectively, from 2 patients with DCM and 2 controls, each, and sequenced them before and after treatment with bisulfite. The methylation data was statistically analyzed by Students t-test, or ANOVA, followed by Dunnett's multiple comparison.

TABLE 1
Primer Sequences for mean CpG-island methylation of candidate genes.

| Genes | Forward primers | Reverse primers |
|---|---|---|
| ADORA2A | TTTTTTAGGTGGGTGTTGGTAGTT | AATTCCCCTAATCCAATAAAATTCC |
| | (SEQ ID NO. 19) | (SEQ ID NO. 20) |
| ATP2C1 | ATTGGATAAAGGTATAGTTGTTAAAAGAAG | AACAATCACAATCTCAACAAACAAC |
| | (SEQ ID NO. 21) | (SEQ ID NO. 22) |
| CCDC59 | TTTTTAGTGGAAGTAGAGTGGGAAG | TTAAAACAACCTCCTTACACAATCC |
| | (SEQ ID NO. 23) | (SEQ ID NO. 24) |
| CLDN4 | GTTTATTTATAGGTTTTTTTAGATGGTTTG | CATCAAAACTAACTTTATCTCCTAACTCA |
| | (SEQ ID NO. 25) | (SEQ ID NO. 26) |
| ERBB3 | GGAGATTTTTTAGTAGAGAATAGGTTTTTT | TACTACCCAAAACCCTACTAATCCC |
| | (SEQ ID NO. 27) | (SEQ ID NO. 28) |
| FDX1 | TTTGTTTTATAGTGGGTAGAATTTATTT | AACCTATAAAAACATTAACAAACAAAAC |
| | (SEQ ID NO. 29) | (SEQ ID NO. 30) |
| FLJ20701 | GATTTTAAATTTTAGTGAGGGGTGAA | TCCAAAACAAAAAATAAACTCCAAA |
| | (SEQ ID NO. 31) | (SEQ ID NO. 32) |
| GFI1 | TTTATTTTAATGAGTAAAGGGTGTAGGT | CCTAAAATCATACCCAAACACTAAAT |
| | (SEQ ID NO. 33) | (SEQ ID NO. 34) |
| GSTM5 | GGAGGGGGTTTATTGATTTTAGTTT | TAACTTTCTCTACACCAAACCAACC |
| | (SEQ ID NO. 35) | (SEQ ID NO. 36) |
| HOXB13 | GGTAGTTTTTGGTTTTGGGTTTT | ACTATCCCTAAATCTCATCTCTCCC |
| | (SEQ ID NO. 37) | (SEQ ID NO. 38) |
| ID4 | AATGGAGTGTTTTTTTTATTGGTT | AATATCCTAATCACTCCCTTC |
| | (SEQ ID NO. 39) | (SEQ ID NO. 40) |
| LY75 | GTATTTTTGTTTAGGTTTTTGGGG | AAAAATCATAAATCCCTTTCCAATC |
| | (SEQ ID NO. 41) | (SEQ ID NO. 42) |
| NAT1 | TTTTTTTAGGAAGTAAAAGGAATGTT | TCAAACTACCCTAATCTCACTATCCC |
| | (SEQ ID NO. 43) | (SEQ ID NO. 44) |
| PPARGC1A | GATTTTTTTAAAAGTTTTTGTTTGG | ACAAATACCTTCAATTCACTCTCAA |
| | (SEQ ID NO. 45) | (SEQ ID NO. 46) |
| SLC9A6 | GTTTTTGATTGGGTAGGGGT | AACTTACCATAAATCATAACCAAACC |
| | (SEQ ID NO. 47) | (SEQ ID NO. 48) |
| SULF2 | GAGTTTTGTGAAAGTAGATAAAAGAAAAT | TAACACACAAACCAAAAAACATC |
| | (SEQ ID NO. 49) | (SEQ ID NO. 50) |
| TDG | TGGTTGGTAGTATTTAGATAGTGGTTG | ATATACACAACACCCCAAAAACAA |
| | (SEQ ID NO. 51) | (SEQ ID NO. 52) |
| TFF1 | AGGTTGTTAGAGTTGGTTGTGGTT | AACTTTCTAAATCTCAAATCCCTCAA |
| | (SEQ ID NO. 53) | (SEQ ID NO. 54) |
| TKT | GGGAAGGTTATTATTATTGTTGTTTT | AAATCCCAAAATTCTACACCCA |
| | (SEQ ID NO. 55) | (SEQ ID NO. 56) |
| XRCC5 | GTTTTTTGTTAGGTTTGAAAGGGG | AAAAAAAATCTAACTCCAAAACTCTAA |
| | (SEQ ID NO. 57) | (SEQ ID NO. 58) |

[0170] The respective target genomic sequences are shown in SEQ ID NOs. 59 to 78:

[0171] target genomic sequence of gene

| | |
|---|---|
| ADORA 2A | SEQ ID NO. 59; |
| ATP2C1 | SEQ ID NO. 60; |
| CCDC59 | SEQ ID NO. 61; |
| CLDN4 | SEQ ID NO. 62; |
| ERBB3 | SEQ ID NO. 63; |
| FDX1 | SEQ ID NO. 64; |
| FLJ20701 | SEQ ID NO. 65; |
| GFI1 | SEQ ID NO. 66; |
| GSTM5 | SEQ ID NO. 67; |
| HOXB13 | SEQ ID NO. 68; |
| ID4 | SEQ ID NO. 69; |
| LY75 | SEQ ID NO. 70; |
| NAT1 | SEQ ID NO. 71; |
| PPARGC1A | SEQ ID NO. 72; |
| SLC9A6 | SEQ ID NO. 73; |
| SULF2 | SEQ ID NO. 74; |
| TDG | SEQ ID NO. 75; |
| TFF1 | SEQ ID NO. 76; |
| TKT | SEQ ID NO. 77; |
| XRCC5 | SEQ ID NO. 78. |

### 1.5 Promoter Luciferase Assay

[0172] To assess the causative link of CGI methylation within the promoter region of LY75 with reduced mRNA expression observed in myocardial tissue, we performed a promoter luciferase assay essentially as described before (Smith et al., 2006). Therefore, we cloned a 1.6 kb large core fragment (Table 2) of the LY75 promoter region including the analyzed CGI into SpeI/BamHI sites of the CpG-free luciferase vector pCpGL-basic. As negative control for the methylation effect we utilized the CpG-free control reporter vector pCpGL-CMV/EF1 (Klug and Rehli, 2006). Next, we treated both vectors with the methylase SssI (New England BioLabs) or leaved them untreated, respectively. The methylation was performed at 10 mM Tris, pH7.9, 50 mM NaCl, 10 mM MgCl₂, 1 mM DTT and 160 μM SAM at 37° C. for 1 hour (Blesa et al., 2008). Transfection of human HEK293A cells with equal amounts of the SssI-treated or untreated pCpG-LY75 or pCpGL-CMV/EF1 vectors was carried out using Lipofectamin (Invitrogen). Additionally, we co-transfected these cells with the pGL4.74 [hRluc/TK] Renilla control vector as a reference (Promega). After 48 hours, cells were lysed and luciferase and Renilla activity measured according to manufactures protocol (Dual-Luciferase Reporter Assay System, Promega). Results are expressed as relative luciferase activity (background subtracted and normalized to Renilla reference; three technical replicates) of the methylated versus the unmethylated constructs.

TABLE 2
Primer sequences for promoter
luciferase assay.

| Gene | Forward primer | Reverse primer |
|---|---|---|
| LY75 | TGGCACTACCCTGAACATCA | CATGAAATTTCTGGTTCTGCAT |
| | (SEQ ID NO. 79) | (SEQ ID NO. 80) |

[0173] The respective target genomic sequence is shown in SEQ ID NO. 81.

### 1.6 Promoter Region Prediction and Transcription Factor Binding Site Analysis

[0174] We applied the Promoter 2.0 Prediction Software that predicts transcription start-sites (TSS) of vertebrate Pol II promoters in genomic DNA to estimate the distance of the CGIs from the potential transcriptional start-sites (Knudsen 1999). For the detection of transcription factor binding sites, the ENCODE transcription factor ChIP-seq data was used. For each region (size of the CGI and 1500 bp up- and downstream), we selected in the maximum the three factors up- and three factors downstream with strongest observed binding.

### 1.7 Hierarchical Clustering

[0175] To generate a graphical representation of the most significantly dys-methylated cardiac genes in the screening stage and to detect patterns among the respective genes, hierarchical clustering was applied. Prior to the clustering, the patients were ranked for each gene according to the degree of methylation, i.e., the patient with the lowest degree of methylation for a certain gene received a rank of 1, while the patient with the highest degree of methylation received a rank of 17, since 17 samples have met filter criteria for the screening stage. Then, for all samples and all genes the pair-wise Euclidian distances were computed and a bottom-up clustering on these distances was carried out. All computations were carried out using the statistical programming language R.

### 1.8 Gene Network Analysis

[0176] To test whether genes with differential methylation patterns belong to a certain biological category we carried out an unweighted Gene Set Enrichment Analysis (GSEA). In detail, we first sorted all genes according to the absolute value of the median distances between DCM patients and controls, generated a sorted list of genes where the most differentially methylated genes were on top while genes without differential methylation were located at the bottom of the list. If one gene was represented by multiple features on the biochip (different methylation sites) the median position of all replicates in the sorted list was computed. This sorted list was then used as input for GeneTrail (Backer et al. 2007). For each category, a significance value is computed by a dynamic programming approach (Keller et al. 2007) and all significance values of a certain category have been adjusted for multiple testing using Benjamini-Hochberg adjustment (Benjamini and Hochberg, 1995). The advantage of the applied cutoff-free biostatistical approach is that genes with p-values of 0.049 and 0.051 are considered to be almost equally important in our approach while genes with larger values in the middle and at the end of the list are considered to be not of relevance. In contrast, classical over-representation analyses relying on cutoffs (usually 0.05) would consider genes with p-value of 0.049 of relevance while genes with p-values of 0.051 would be considered to be non-relevant, having the same impact as genes with large p-values.

### 1.10 Transcriptomic Analyzes

[0177] Quantitative real-time PCR (q-PCR) was performed in order to measure expression of selected genes. Primers were designed using NCBI Primer-Blast and synthesized by Eurofins MWG Operon (Ebersberg, Germany). 60 ng of total RNA extracted from biopsies of independent DCM patients (moderate: n=7; severe: n=5) and controls (n=7) was reverse transcribed using SuperScript III first strand cDNA synthesis kit (Invitrogen). q-PCR was carried out according to standard protocols with the SYBR-Green method (Thermo Scientific) using an ABI 7000 system (ABI). Specificity of each primer-pair was monitored by dissociation curve analysis. Threshold cycle (CT) values were assessed in the exponential phase of amplification and the data were analyzed using the delta-CT method. The mean value of the reference genes GAPDH, RPL13 and â-actin was used as a reference.

[0178] To identify the predominant cardiac isoform of ADORA2A, we performed PCR with the following primer-pair for both isoforms (ENST00000337539 and ENST00000541988):

[SEQ ID NO. 82]
5′-CTGTGACATGGAGCAGGAGC-3′
and
[SEQ ID NO. 83]
5′-GCTGTCGTTTGCCATCGGCCT-3′.

[0179] To evaluate the expression levels of ly75 and adora2a in the zebrafish heart and whole organism, we performed q-PCR with the following primer-pair for ly75:

[SEQ ID NO. 84]
5′-CATGGCCAGTTTCGATCCAT-3′
and
[SEQ ID NO. 85]
5′-CACCTGGGACTACACCTCCT-3′

[0180] and adora2a:

[SEQ ID NO. 86]
5′-TGCTGACCCAGAGCTCCATA-3′
and
[SEQ ID NO. 87]
5′-AGAGGCATCATCGCGATCTG-3′.

[0181] Results are shown as relative expression values (normalization against the house-keeping gene elf1a).

[0182] To analyze the expression of ly75 and adora2a in different cell types, we cultured neonatal rat cardiomyocytes and cardiofibroblasts for 5 days and proceeded as described above. q-PCR was performed using the primer pairs

18s RNA
[SEQ ID NO. 88]
5′-GGACATCTAAGGGCATCAC-3′
and
[SEQ ID NO. 89]
5′-CCTCCGACTTTCGTTCTTGA-3′;
LY75
[SEQ ID NO. 90]
5′-CACGGTCTGATGAGCTGTGT-3′
and
[SEQ ID NO. 91]
5′-ACGAACTGCAACCTGACCAT-3′;
ADORA2A
[SEQ ID NO. 92]
5′-CTGGTCCTCACGCAGAGTTC-3′
and
[SEQ ID NO. 93]
5′-GCGAAGGGCATCATTGCAAT-3′.

[0183] The methylation data was statistically analyzed by Students t-test.

### 1.10 Morpholino-Mediated Gene Knock-Down in Zebrafish

[0184] The zebrafish experiments were performed under institutional approvals that conform to the Guide for the Care and Use of Laboratory Animals published by The US National Institute of Health (NIH Publication No. 85-23, revised 1996). Care and breeding of zebrafish (Danio redo) were as described (Meder et al. 2011).

[0185] The following Morpholino-modified antisense oligonucleotides (GeneTools, USA) were designed:

[0186] The ly75 (ENSDARG00000053113) Morpholino targets the splice-donor site of exon 3:

MO-ly75:
[SEQ ID NO. 94]
5′-GTGATGAAACGCACACCTCTCCTGA-3′;
scrambled control MO3-control:
[SEQ ID NO. 95]
5′-GTCATGAAAGGCACACGTCTGCTCA-3′),

[0187] while adora2a (ENSDARG00000033706) was targeted at its start-site:

MO-adora2a:
[SEQ ID NO. 96]
5′-CATTGTTCAGCATGGTGAGGTCGCT-3′;
scrambled control MO2-control:
[SEQ ID NO. 97]
5′-CATTCTTCACCATCGTGACGTGGCT-3′.

[0188] Morpholinos or control oligonucleotides (MO-control) were injected into 1-cell stage embryos as described before (Meder et al. 2009). To confirm the efficiency of splice-site Morpholinos, we analyzed their target region by cDNA splice-site analysis (Meder et al. 2011).

### 1.11 Functional Assessment and Statistical Analysis of Cardiac Function

[0189] Still images and video films were recorded and digitized with a Zeiss microscope/MCU II. The functional assessment of cardiac contractility was carried out as described before (Meder et al. 2009). Atrial and ventricular diameters were measured to calculate fractional shortening with the help of the zebraFS software (http://www.mederlab.com). Results are expressed as mean±standard deviation. MF20/S46 stainings and mRNA antisense in situ hybridization was performed as described previously (Meder et al. 2009).

### 2. Results

[0190] 2.1 DNA Methylation is Altered in Patients with DCM

[0191] We performed here a two-staged, funnel-like DNA methylation mapping in non-ischemic, idiopathic DCM patients and controls (Table 3).

TABLE 3
Study sample characteristics of the
screening and replication cohorts.

| Cohort | N | Female (%) | Age (years) | LV-EF (%) |
|---|---|---|---|---|
| Screening | | | | |
| DCM cases | 9 | 33 | 57 ± 5.4 | 27 ± 7.5 |
| Controls | 8 | 38 | 42 ± 14 | 60 ± 4 |
| Replication | | | | |
| DCM Cases | 30 | 37 | 58 ± 14 | 25.6 ± 8.4 |
| Controls | 28 | 46 | 57 ± 12 | 61.5 ± 5.3 |

Female = female donor status of transplanted heart;
LV-EF = left ventricular ejection fraction.

[0192] In the screening stage, we assessed genome-wide DNA methylation levels of CpG islands (CGIs) using the Infinium HumanMethylation 27 platform. To do so, we first extracted 1000 ng of genomic DNA from LV biopsies from 10 DCM patients and 10 controls. After methylation profiling, 17 datasets passed the stringent quality filter criteria, exemplarily shown by reaching highly similar bead color signal intensities (data not shown). FIG. 1A shows a correlation-plot of the 27,578 individual methylation-sites for all further analyzed patients and controls. While the degree of methylation for most CpG sites is highly correlated between the two groups, we detect several CGIs that are hypo- (green dots) or hyper-methylated (red dots) in DCM compared to the controls (unadjusted p-value <0.05).

[0193] We used the comprehensive screening datasets in a Gene Set Enrichment Analysis (GSEA) and identified within the top three (ranked by p-values) enriched disease categories provided by the “National Institute of Aging” (NIA) the disease pathways “Cardiovascular Disease”, “Metabolic Disease”, and “Pathological Conditions”, all reasonably associated with DCM and with considerable overlaps between each other (FIG. 1B). To detect patterns of genes with differential methylation in the screening cohorts, we carried out a clustering approach on genes with known abundant expression in the human heart (http://c-it.mpi-bn.mpg.de). From the annotated 2,018 individual genes, 1,858 (92.1%) were covered by the applied Infinium assay. Since the degrees of methylation for the genes were not normally distributed, we used two-tailed Wilcoxon rank-sum test to compute a significance value for each gene, which resulted in a total of 90 genes surpassing statistical significance (p-value <0.05). While about one third showed increased methylation in DCM patients, approximately two thirds were significantly less methylated. FIG. 1C gives a graphical representation of differential methylation patterns by using hierarchical clustering on the Euclidian distance. The heat map shows the patterns of higher- and lower methylated genes in DCM patients and controls.

[0194] For the replication stage in an independent cohort, methylation patterns of single genes were used to define candidates for a mass-spectrometry-based fine-mapping. FIGS. 2 A and B show the five most hyper- and hypomethylated genes, while C details the 20 most significantly dys-methylated genes of the screening stage. The final selection was based on either unadjusted p-values or absolute methylation difference, CGI localization, capability to design specific assay probes, and known expression in the heart.

### 2.2 Validation of Aberrant DNA Methylation in DCM

[0195] As denoted above, we carried out an independent replication and fine-mapping of the selected genes in a larger cohort of 30 idiopathic DCM patients and 28 controls. The selected candidates were fine-mapped by using MassARRAY (Ehrich et al. 2005).

[0196] For each gene, several CpGs were retrieved and their methylation status quantified. From 20 candidate genes, twelve showed the same direction of altered methylation between the screening and the replication stage and four of them reached statistical significance, namely LY75 (p=0.000), ERBB3 (p=0.013), HOXB13 (p=0.001), and ADORA2A (p=0.011). FIG. 3 presents the mean methylation changes of the replicated genes. Additionally, methylation of individual CpGs is displayed for LY75 and ERBB3 (FIG. 3A, B), HOXB13 (FIG. 3C) and ADORA2A (FIG. 3D). Interestingly, ADORA2A showed significantly altered methylation throughout all tested CpGs, while ERBB3 or LY75 showed methylation alterations in a subset of the CpG nucleotides, possibly resulting in different functional consequences. FIG. 4 gives the mean methylation of the rest of the investigated CGIs. Since epigenetic marks may be also dependent on the gender, we additionally matched the gender ratio of cases and controls of the replication cohort to the ratio of the screening cohort, leading to significance of the same CGIs shown above. This is also true when matching females and males 1:1.

[0197] In addition to MassARRAY, we also applied bisulfite sequencing for LY75 and ADORA2A to fine-map and again technically replicate our results. To do so, we generated 14 LY75 and 12 ADORA2A clones from two DCM patients and two controls each, and sequenced them before and after treatment with bisulfite (FIG. 3A and FIG. 3D; black circles=methylated CpG, white circles=unmethylated CpG). Bisulfite sequencing confirmed the corresponding MassARRAY data and, hence, demonstrated reliability of the latter technique.

[0198] Next, to rule out a potential effect of the immunosuppressive medication received by the control subjects (Table 4) on the methylation of the here investigated genes, we analyzed the methylation patterns of genomic DNA of 11 subjects drawn pre- and post-heart transplantation (HTX) (mean timespan after HTX=37 months under medication). As shown in FIG. 5 we found highly comparable methylation levels (p=n.s.) of LY75, ADORA2A, ERBB3, and HOXB13 CGIs in pre- and post-HTX, indicating that the observed methylation differences in DCM is not due to methylation changes in the controls receiving immunosuppressive medication.

TABLE 4
Immunosuppressive medication of control individuals.

| Medication | N | % |
|---|---|---|
| Tacrolimus | 19 | 54 |
| Mycophenolat- | 23 | 66 |
| Ciclosporin | 8 | 23 |
| Prednisolon | 11 | 31 |
| Everolimus | 14 | 40 |

[0199] All control individuals received one or more immunosuppressives.

### 2.3 Differential Gene Expression and Functional Evaluation In Vivo Points Towards a Functional Role of Altered DNA Methylation in DCM

[0200] DNA methylation is often correlated with changes in the accessibility of DNA to transcriptional activators, enhancers, or repressors. Hence, we first studied the impact of DNA methylation at LY75, ERBB3, HOXB13, and ADORA2A loci on their gene expression by quantitative PCR (q-PCR) in controls, mild DCM (NYHA class II) and moderate to severe DCM (NYHA class III-IV).

[0201] For ADORA2A, we found a positive relationship of gene expression with methylation (relative expression=0.33; p=0.002), while ERBB3 did not show significant alterations in cardiac expression levels (FIG. 6B, C, D). HOXB13 transcripts could not be PCR amplified in LV biopsies from both, patients and controls. In case of LY75, the hypermethylated CpG island is relatively close to the transcriptional start-site (distance 1,395 bp), whereas the distance between the CGIs in ERBB3 (7,518 bp) and ADORA2A (14,329 bp) is markedly larger (FIG. 3). Since we observed also a strong reduction in LY75 expression in myocardial tissue (relative expression=0.04; p=0.001) in patients with DCM (FIG. 6A, D), we asked if increased promoter methylation is directly responsible for decreased transcriptional activity. Hence, we performed a luciferase promoter assay with methylated and unmethylated LY75 promoters. As a negative control served the CpG-free control reporter vector pCpGL-CMV/EF1. As shown in FIG. 6E, we found a strong reduction in promoter activity after in vitro methylation, supporting the functional relationship between LY75 hypermethylation and reduced expression in human DCM.

[0202] Since we found a rather unusual positive relationship of ADORA2A gene expression and methylation, we first sought to identify the predominant isoform of ADORA2A in the human myocardium. By PCR, we found that the longer ADORA2A transcripts ENST00000337539 and ENST00000541988 are highly expressed in the heart. However isoform ENST00000417596, which is highly expressed in peripheral blood, is not significantly expressed in the heart. We then investigated potential repressor regions in the close vicinity of the tested CGIs. For the detection of transcription factor binding sites, the ENCODE transcription factor ChIP-seq data was used. We found for the aberrantly methylated CGI-1 two potential repressor sites (CTCF and NFKB), for aberrantly methylated CGI-2 one repressor site (CTCF) and for the unaltered CGI-3 one repressor site (Max). Interestingly, both hypomethylated CGIs (1 and 2) carry CTCF binding sites, which were recently identified as epigenetic key regulators in various other diseases.

[0203] Since LY75 and ADORA2A were not previously known to be involved in DCM or heart failure pathogenesis and both showed significant downregulation in the myocardium of DCM patients, we investigated their functional roles by gene knockdown in zebrafish embryos (Dahme et al., 2009). We identified orthologous sequences for human LY75 and ADORA2A by BLAST searches against the zebrafish Genbank database. Protein sequence identity between the zebrafish and human version was 61% for adora2a (FIG. 9A) and 37% for ly75 (FIG. 10). Similar to the human situation, we found adora2a and ly75 to be highly expressed in the zebrafish heart using q-PCR and RNA antisense in-situ hybridization (FIGS. 7, 8 and 9). Additionally, as shown in cultured neonatal rat cells, both genes are higher expressed in cardiomyocytes than in cardiofibroblasts (FIG. 7B, C). Hence, to recapitulate the downregulation of both genes as observed in the human heart, we inactivated them in zebrafish embryos by injection of Morpholino-modified antisense oligonucleotides directed against the splice donor-site of ly75 or the translational start-site of adora2a. While control-injected zebrafish (standard control Morpholino as well as scrambled control Morpholinos) embryos did not show any obvious phenotype, splice-site Morpholino-mediated knockdown of ly75 resulted in partial skipping of exon 8 (FIG. 8D) and consecutive frameshift that predictably leads to a premature stop of protein translation. As a result, ly75-morphants developed “late-onset” heart failure with dilation of the atrium (FIG. 8C) and reduced ventricular contractility beginning at the 96 hours developmental stage (FS=46±5% at 48 hpf and 29±4% at 96 hpf) (FIG. 8E). Additionally, ly75-morphants showed a pronounced detachment and edema of the skin especially noticeable in the eye and head region (FIG. 8C). MO-adora2a injected embryos also developed severe heart failure with progressively decreasing ventricular contractility as measured by fractional shortening (FIG. 9E). In detail, the ventricular contractility of adora2a-morphants decreased from 47±11% at 48 hpf to 39±8% at 72 hpf. By 96 hpf, both heart chambers became almost silent. Occasionally, we also observed atrial fibrillation in adora2a-morphants and embryos developed excessive pericardial effusion and precardial blood congestion as consequence of the reduced cardiac function. For both, ly75- and adora2a-morphants, we saw no alterations in the molecular chamber specification and expression of atrial and ventricular myosin heavy chain genes (FIGS. 8 and 9).

[0204] For investigating the functional role of ERBB3, we also used the zebrafish as animal model. We find homology of 56% between human and zebrafish orthologues sequence of ERBB3. Knock-down of erbb3b results in a similar, but earlier phenotype as adora2a. Already by 72 hpf, 86% of injected erbb3b-morphants suffer from significantly reduced cardiac contractility, reduced blood flow through the atrium and ventricle, and pericardial effusion (data not shown). FS at 96 hpf is reduced to 21±4% and blood aggregates at the cardiac inflow tract (data not shown). Additionally, erbb3b-morphants show regurgitation of blood into the ventricle (data not shown), suggesting impaired cardiac valve development. cDNA splice-site analysis revealed a completely insertion of intron 2 as well a partial exclusion exon 2 producing an aberrant, frameshifted transcripts with premature termination codons.

[0205] The features disclosed in the foregoing description, in the claims and/or in the accompanying drawings may, both separately and in any combination thereof, be material for realizing the invention in diverse forms thereof

### REFERENCES

[0206] Backes C, Keller A, Kuentzer J, Kneissl B, Comtesse N, Elnakady Y A, Muller R, Meese E, Lenhof H P. GeneTrail—advanced gene set enrichment analysis. Nucleic Acids Res 2007; 35(Web Server issue):W186-92.
[0207] Backs J, Song K, Bezprozvannaya S, Chang S, Olson E N. CaM kinase II selectively signals to histone deacetylase 4 during cardiomyocyte hypertrophy. J Clin Invest 2006; 116(7):1853-64.
[0208] Backs J, Backs T, Bezprozvannaya S, McKinsey T A, Olson E N. Histone deacetylase 5 acquires calcium/calmodulin-dependent kinase II responsiveness by oligomerization with histone deacetylase 4. Mol Cell Biol 2008; 28(10):3437-45.
[0209] Bell, A. C., A. G. West, and G. Felsenfeld, The protein CTCF is required for the enhancer blocking activity of vertebrate insulators. Cell, 1999. 98(3): p. 387-96.
[0210] Bell, A. C. and G. Felsenfeld, Methylation of a CTCF-dependent boundary controls imprinted expression of the Igf2 gene. Nature, 2000. 405(6785): p. 482-5.
[0211] Benjamini Y, Hochberg Y. Controlling the false discovery rate: A practical and powerful approach to multiple testing. J R Statist Soc B 1995; 57:289-300.
[0212] Bielecka-Dabrowa et al., New methods in laboratory diagnostics of dilated cardiomyopathy. Cardiol J. 2008; 15(4):388-95
[0213] Blesa, J. R., A. A. Hegde, and J. Hernandez-Yago, In vitro methylation of nuclear respiratory factor-2 binding sites suppresses the promoter activity of the human TOMM70 gene. Gene, 2008. 427(1-2): p. 58-64.
[0214] Coppede F. Epigenetic biomarkers of colorectal cancer: focus on DNA methylation. Cancer Lett 2011.
[0215] Dahme, T., H. A. Katus, and W. Rottbauer, Fishing for the genetic basis of cardiovascular disease. Dis Model Mech, 2009. 2(1-2): p. 18-22.
[0216] Ehrich M, Nelson M R, Stanssens P, Zabeau M, Liloglou T, Xinarianos G, Cantor C R, Field J K, van den Boom D. Quantitative high-throughput analysis of DNA methylation patterns by base-specific cleavage and mass spectrometry. Proc Natl Acad Sci USA 2005; 102(44):15785-90.
[0217] Erickson S L, O'Shea K S, Ghaboosi N, Loverro L, Frantz G, Bauer M, Lu L H, Moore M W. ErbB3 is required for normal cerebellar and cardiac development: a comparison with ErB2- and heregulin-deficient mice. Development. 1997 December; 124(24):4999-5011.
[0218] Feinberg A P, Tycko B. The history of cancer epigenetics. Nat Rev Cancer 2004; 4(2):143-53.
[0219] Friedrichs F, Zugck C, Rauch G J, Ivandic B, Weichenhan D, Muller-Bardorff M, Meder B, El Mokhtari N E, Regitz-Zagrosek V, Hetzer R, Schafer A, Schreiber S, Chen J, Neuhaus I, Ji R, Siemers N O, Frey N, Rottbauer W, Katus H A, Stoll M. HBEGF, SRA1, and IK: Three cosegregating genes as determinants of cardiomyopathy. Genome Res 2009; 19(3):395-403.
[0220] Gaszner, M. and G. Felsenfeld, Insulators: exploiting transcriptional and epigenetic mechanisms. Nat Rev Genet, 2006. 7(9): p. 703-13.
[0221] Giridhar P V, Funk H M, Gallo C A, Porollo A, Mercer C A, Plas D R, Drew A F. Interleukin-6 receptor enhances early colonization of the murine omentum by upregulation of a mannose family receptor, LY75, in ovarian tumor cells. Clin Exp Metastasis 2011; 28(8):887-97.
[0222] Grzeskowiak, R., et al., Expression profiling of human idiopathic dilated cardiomyopathy. Cardiovasc Res, 2003. 59(2): p. 400-11.
[0223] Hamad E A, Li X, Song J, Zhang X Q, Myers V, Funakoshi H, Zhang J, Wang J, Li J, Swope D, Madonick A, Farber J, Radice G L, Cheung J Y, Chan T O, Feldman A M. Effects of cardiac-restricted overexpression of the A(2A) adenosine receptor on adriamycin-induced cardiotoxicity. Am J Physiol Heart Circ Physiol 2010; 298(6):H1738-47.
[0224] Herceg Z, Vaissiere T. Epigenetic mechanisms and cancer: an interface between the environment and the genome. Epigenetics 2011; 6(7):804-19.
[0225] Jirtle R L, Skinner M K. Environmental epigenomics and disease susceptibility. Nat Rev Genet 2007; 8(4):253-62.
[0226] Jones P A, Baylin S B. The fundamental role of epigenetic events in cancer. Nat Rev Genet 2002; 3(6):415-28.
[0227] Keller A, Backes C, Lenhof H P. Computation of significance scores of unweighted Gene Set Enrichment Analyses. BMC Bioinformatics 2007; 8:290.
[0228] Klug, M. and M. Rehli, Functional analysis of promoter CpG methylation using a CpG-free luciferase reporter vector. Epigenetics, 2006. 1(3): p. 127-30.
[0229] Knudsen, S., Promoter2.0: for the recognition of PolII promoter sequences. Bioinformatics, 1999. 15(5): p. 356-61.
[0230] Litzow M R. Novel therapeutic approaches for acute lymphoblastic leukemia. Hematol Oncol Clin North Am 2011; 25(6):1303-17.
[0231] Meder B, Laufer C, Hassel D, Just S, Marquart S, Vogel B, Hess A, Fishman M C, Katus H A, Rottbauer W. A single serine in the carboxyl terminus of cardiac essential myosin light chain-1 controls cardiomyocyte contractility in vivo. Circ Res 2009; 104(5):650-9.
[0232] Meder B, Huttner I G, Sedaghat-Hamedani F, Just S, Dahme T, Frese K S, Vogel B, Kohler D, Kloos W, Rudloff J, Marquart S, Katus H A, Rottbauer W. PINCH proteins regulate cardiac contractility by modulating integrin-linked kinase-protein kinase B signaling. Mol Cell Biol 2011; 31(10:3424-35.
[0233] Meurs K M, Kuan M. Differential methylation of CpG sites in two isoforms of myosin binding protein C, an important hypertrophic cardiomyopathy gene. Environ Mol Mutagen 2011; 52(2):161-4.
[0234] Montgomery R L, Davis C A, Potthoff M J, Haberland M, Fielitz J, Qi X, Hill J A, Richardson J A, Olson E N. Histone deacetylases 1 and 2 redundantly regulate cardiac morphogenesis, growth, and contractility. Genes Dev 2007; 21(14):1790-802.
[0235] Movassagh M, Choy M K, Knowles D A, Cordeddu L, Haider S, Down T, Siggens L, Vujic A, Simeoni I, Penkett C, Goddard M, Lio P, Bennett M R, Foo R S. Distinct epigenomic features in end-stage failing human hearts. Circulation 2011; 124(22):2411-22.
[0236] Smith, L. T., et al., Epigenetic regulation of the tumor suppressor gene TCF21 on 6q23-q24 in lung and head and neck cancer. Proc Natl Acad Sci USA, 2006. 103(4): p. 982-7.
[0237] Sommerschild H T, Kirkeboen K A. Adenosine and cardioprotection during ischaemia and reperfusion—an overview. Acta Anaesthesiol Scand 2000; 44(9):1038-55.
[0238] Takai D, Jones P A. Comprehensive analysis of CpG islands in human chromosomes 21 and 22. Proc Natl Acad Sci USA 2002; 99(6):3740-5.
[0239] Talens, R. P., et al., Variation, patterns, and temporal stability of DNA methylation: considerations for epigenetic epidemiology. Faseb J, 2010. 24(9): p. 3135-44.
[0240] Timonen P, Magga J, Risteli J, Punnonen K, Vanninen E, Turpeinen A, Tuomainen P, Kuusisto J, Vuolteenaho O, Peuhkurinen K. Cytokines, interstitial collagen and ventricular remodelling in dilated cardiomyopathy. Int J Cardiol 2008; 124(3):293-300.
[0241] Urmaliya V B, Church J E, Coupar I M, Rose′Meyer R B, Pouton C W, White P J. Cardioprotection induced by adenosine A1 receptor agonists in a cardiac cell ischemia model involves cooperative activation of adenosine A2A and A2B receptors by endogenous adenosine. J Cardiovasc Pharmacol 2009; 53(5):424-33.
[0242] Villard E, Perret C, Gary F, Proust C, Dilanian G, Hengstenberg C, Ruppert V, Arbustini E, Wichter T, Germain M, Dubourg O, Tavazzi L, Aumont M C, Degroote P, Fauchier L, Trochu J N, Gibelin P, Aupetit J F, Stark K, Erdmann J, Hetzer R, Roberts A M, Barton P J, Regitz-Zagrosek V, Aslam U, Duboscq-Bidot L, Meyborg M, Maisch B, Madeira H, Waldenstrom A, Galve E, Cleland J G, Dorent R, Roizes G, Zeller T, Blankenberg S, Goodall A H, Cook S, Tregouet D A, Tiret L, Isnard R, Komajda M, Charron P, Cambien F. A genome-wide association study identifies two loci associated with heart failure due to dilated cardiomyopathy. Eur Heart J 2011.
[0243] Zhang X, Yazaki J, Sundaresan A, Cokus S, Chan S W, Chen H, Henderson I R, Shinn P, Pellegrini M, Jacobsen S E, Ecker J R. Genome-wide high-resolution mapping and functional analysis of DNA methylation in arabidopsis. Cell 2006; 126(6):1189-201.

1-29. (canceled)

30. A method for the diagnosis, prognosis and/or therapy monitoring of a heart disease in a patient, comprising
determining a DNA methylation profile in a patient sample comprising genomic DNA from heart cells, heart tissue or peripheral blood; and
comparing the DNA methylation profile in the patient sample with the DNA methylation profile from a normal subject not having a heart disease or having a normal heart function, wherein a difference in the DNA methylation profile is indicative of a heart disease or of the risk for developing a heart disease or for a prediction of therapy effects or therapy outcome.

31. The method according to claim 30, comprising contacting genomic DNA isolated from the patient sample with at least one reagent that distinguishes between methylated and non-methylated CpG dinucleotides.

32. The method according to claim 30, wherein the DNA methylation profile is a genome-wide DNA methylation profile, and/or comprises the DNA methylation levels of CpG nucleotides.

33. The method according to claim 30, wherein the difference in the DNA methylation profile of the patient sample compared to the DNA methylation profile of the control sample is a different degree of CpG methylation.

34. The method according to claim 30, wherein the DNA methylation profile of the patient sample is determined over time at different time points.

35. The method according to claim 30, wherein the heart disease is a cardiomyopathy, myocardial insufficiency, or heart failure (acute or chronic).

36. The method, according to claim 35, wherein the heart disease is selected from dilated cardiomyopathy (DCM), hypertrophic cardiomyopathy (HCM), ischemic cardiomyopathy, diastolic dysfunction, and myocardial infarction.

37. The method according to claim 30, wherein the patient sample is a sample of left ventricular tissue, right ventricular tissue or peripheral blood.

38. The method according to claim 30, wherein the control sample is from a normal subject not having a heart disease or having a normal heart function.

39. The method according to claim 30, wherein the prognosis of a heart disease comprises risk stratification and/or disease classification,
and/or wherein the therapy monitoring of a heart disease comprises treatment monitoring or treatment decision making as well as the prediction of therapy effects or therapy outcome.

40. The method according to claim 30, wherein the methylation level is different in the patient sample compared to the control sample for at least one gene selected from:

| | |
|---|---|
| adenosine receptor | SEQ ID NO. 1 |
| A2A (ADORA2A) | |
| ERBB3 | SEQ ID NO. 2 |
| LY75 | SEQ ID NO. 3 |
| HOXB13 | SEQ ID NO. 4 |
| GFI1 | SEQ ID NO. 5 |
| CLDN4 | SEQ ID NO. 6 |
| FDX1 | SEQ ID NO. 7 |
| ID4 | SEQ ID NO. 8 |
| NAT1 | SEQ ID NO. 9 |
| PPARGC1A | SEQ ID NO. 10 |
| SULF2 | SEQ ID NO. 11 |
| TFF1 | SEQ ID NO. 12 |
| TKT | SEQ ID NO. 13 |
| ATP2C | SEQ ID NO. 14 |
| CCDC59 | SEQ ID NO. 15 |
| GSTM5m | SEQ ID NO. 16 |
| SLC9A6 | SEQ ID NO. 17 and |
| TDG | SEQ ID NO. 18. |

41. The method, according to claim 40, wherein the methylation level is different in the patient sample compared to the control sample for at least one gene selected from LY75, ADORA2A, ERBB3, and HOXB13.

42. The method according to claim 40, wherein the methylation level of at least one of ADORA2A, ERBB3, HOXB13, CLDN4, FDX1, ID4, NAT1, PPARGC1A, SULF2, TFF1 and TKT (SEQ ID NOs. 1, 2, 4, 6-13) is reduced in the patient sample compared to the control sample (hypo-methylation).

43. The method, according to claim 42, wherein the methylation status of at least one of ADORA2A, ERBB3, and HOXRI3 is reduced in the patient sample compared to the control sample.

44. The method according to claim 40, wherein the methylation level of at least one of LY75, GFI1, ATP2C, CCDC59, GSTM5m, SLC9A6 and TDG (SEQ ID NOs. 3, 5, 14-18) is higher in the patient sample compared to the control sample (hyper-methylation).

45. The method, according to claim 44, wherein the methylation status of LY75 is higher in the patient sample compared to the control sample.

46. A kit for the diagnosis, prognosis and/or therapy monitoring of a heart disease in a patient, comprising
at least two sets of oligonucleotides, wherein the oligonucleotides of each set are identical, complementary or hybridize under stringent conditions to an at least 15 nucleotides long segment of a nucleic acid sequence selected from SEQ ID NOs. 1 to 18; and
optionally, a reagent that distinguishes between methylated and non-methylated CpG dinucleotides.

47. The kit according to claim 46, suitable for the use with next-generation sequencing techniques, polymerase-based as well as ligase based sequencing technologies, pyrosequencing, sequencing by ligation, single-molecule sequencing or nanopore sequencing alone or in combination with bisulfite treatment of cytosine nucleotides.

48. A method for the diagnosis, prognosis and/or therapy monitoring of a heart disease in a patient wherein said method comprises the use of at least one of ADORA2A, ERBB3, LY75, HOXB13, GFI1, CLDN4, FDX1, ID4, NAT1, PPARGC1A, SULF2, TFF1, TKT, ATP2C, CCDC59, GSTM5m, SLC9A6 and TDG as a marker for said diagnosis, prognosis and/or therapy monitoring of a heart disease in a patient.

49. The method according to claim 48, comprising determining the methylation level of at least one of SEQ ID NOs. 1-18 in a patient sample comprising genomic DNA from heart cells, heart tissue or peripheral blood; and comparing it with the methylation level from a normal subject not having a heart disease,
wherein a difference in the DNA methylation profile is indicative of a heart disease or of the risk for developing a heart disease or for a prediction of therapy effects or therapy outcome.

50. The method according to claim 48, wherein the heart disease is a cardiomyopathy, myocardial insufficiency, heart failure (acute or chronic).

51. The method according to claim 48, wherein the patient sample is a sample of left ventricular tissue, right ventricular tissue or peripheral blood.

52. The method according to claim 48, wherein the control sample is from a normal subject not having a heart disease or having a normal heart function.

53. The method according to claim 48, wherein the prognosis of a heart disease comprises risk stratification and/or disease classification, and/or wherein the therapy monitoring of a heart disease comprises treatment monitoring or treatment decision making as well as the prediction of therapy effects or therapy outcome.

The application's sequence listing, which the Patent Office published only in electronic form, follows.

SEQUENCE LISTING (97 sequences)

SEQ ID NO: 1 - DNA, 24482 bp, Homo sapiens
gtttatttattttttctttttttttttttggtagaaatgggcttttcgccatgttgcccaagctggtcttgcacttctgggctgaagcaatcctctcgccttggcctcccagagccttgggattacaggtgtgagtcactacagtgattgtgaatgcactgagctggcctggagaacacttaccaccttgtccacgtcacatgcaaaaggcccatggtggtggtgcttcctgcacacgagggcatgtagtgaatgcccttcccaggtggagactcctcagggttgggagcccagcaactgccttggccctgagtaagccaggagttgcactgtgacctgcaagtgcttgggagctgcacccctgggtgccaacagctgcaggtaccctggggtgggcagtgggcaacagctgtagagctgggagctgggcgtgaaaggactggggcaggactgggcttggactcagctcctccctgctcagcagccccttcgttgtgtcctctgctgtgcggaaggggttctgccctagtggtcagcaagcatccatggagcctgccgggcgggccctgtgtgcagcggcctccacacgtcagcaggggactgccgtccctgccagcgcacctgggccttgtcctgggcagcacagaccccttagccaccactcccaggtggggcggtcactcccagatcctccatccgtcccgcctgcagtgcagctgccttggatgctgattagggtggccctgaggggatccttctgtcccaagttacgggcctgcggggcccgtccacagtgctgtgcccctcaatttggagctggctctgctgcttcccagggcagcacctatggggagggcatcgtttataccttgactcaaagttccaggatctcagggacagcttaataggtggaagggggaagctgtgagattccagggagagtggagagattccagggagagtggagagattccagaaggatcccttacacccctccagcaccctcaagggcctgcggtcctgtgcccagacgccacgccctgccccagcagccctgcctggccagctctatggccccagccccacggggccggcacttcgtgcaacctcggggtagcctgggttctattttaggttgtcccttaggtgagggaccggggcagacagaaccagtctcaacatgctcgcagccacttccccgtacatcaggtgagtgaggacagactcctgggttgctgagattcggggatctggattctggcaggagctttgaccccaacaggtctggaccttactgggcatctacaggagctgggccgggcacaagagaggactccatctctcctgcctgacaggagaggactccacctgaccagccctctcaggctgggagtgcctcggggagcctgctgtgaggcagggggaggggtgcggagagaccgggcacagcttgccagttgactgcaccaggcccagagcaggtgctgaaaggtctggtcttttgtctgcaccctcccgtgtttgtgaggaaggggtggcagggggtctgcagtcttaagggccaagcagaaaagaagggccaaggcaggcacccaccaggcaggaagcaggtgtgccctgaggggaaggacaggccatcgcagggctgggttgcacccaagacttctgccaggaagagcactgaggagtcgggacacacaggtcctccccaggtcagccaccgacacttgggatgtgctgggcttgtttccacctctgcaaagcagggcccccttctgggccctcatatcaggcactctgacatggggtacagtcctggcaggtcatggggctggggccacagggagagcgggcaggtggcttagagccatcggggtgatgagtggcaagccccggcatgagggctgcagaggactgtcactgcccacgctggagccagggctccactcccctcagggcctgctttcacatctacgccgatcatccccaaggccgggttgctagcgggttgctgtttgtcctgacacccagaagcagatatggggtgaacatcttgagtggggtggggtgagttggaggatgatgaccagtgactcggagatcacttcctccgtatgtttcttctgcctttgcaggacctctgttaggataaactggagccttgtgaggtccctgccccattggagaagttggggagcacccagggtgacccagttggtttccagggacccttcccctgctcactggctgcttgtcctgggcctggcatgtcttgctcctgatgcagctcagctggcctcagagcaaacaatgagggccagaggccaccaggtgcatcctgggcaggaacaaagggccggaatcctggagctggggaggcccagctggccccgccgccgccgggcctgaggatctggagcctggatggaaggaagggtgggcgcccacagccttttcaaagcctgcctggggctgggcagggaaaccaacgcctggagccagaagctggggcctgccaggggcctccccgtgcccaccaaagggcagtggttgcaattggagagcttctgcccctcagccttgttgctcccttgggcctgggggtgggggaggcgggcagcccaggcacctgcacagggacctcccccagccccacagccttggtatctgaggacagcactcagctgaggtgggtacggggctggcaagggggcagcaaggccaagactgaggaggtggccttaaggcacgtggtgccgagaacacaggcccctccctggagaagacaagctggcttgtggggcaggcagtttggggacagccctgccaggtgccgttccccatccctgaactggacagcttggcctgtgccgtctctgggcaatggcagcgctggagacctgggccaaagcacctgacagatgacacaggaccgcggggctctctgcctctgaagggccagggaggagcccagtaggggaagggtgggggcctggcctgagccggcccatcacagcctccttggcactggctcctcatgggtggctgtggggactgtggagctggctctggggctggagccactccaggccctgcctgaccaccccctggcctcaggacacagttccaccggcgccactgctgaggaatggaggaactgccccttgagccctagaggtgaatgttaagggctttggcactgtgaccctgaggaccagctttggaacaaagccatcactccctgcgtgaggacgttgcggctgcaaccctcctgctgtgggactggggtgcacatggctagaccatgcatgggaaggtccacgcaggaaggttgcgggccccaggatgggaatggcagaggagtcattggggtccacactgggggacgagacagaccctcagaatcggctgagggctggtttctgcctcgtgagccccctgagcccctcaggaagactcaggacgctccgtgcatgtttgctgagtaagggcttgaatgaatctgggtccagcaggtgtgggcgggaggggtttgtccccactagaggagaggttttacctcgtggagagccccagaagcaaggatgggggggccaaggatggggccaagggagggccccatggccgtcagcatccctcacccctaccttgtggtttgacttaacctccaggagggggcagggcagacacaagatactcattttacaggtgaggatatgggtcctggaaggtctgcagggaagcccctgccgctggtcccagggcggtgtccccacctggagggggagctcctccactgaggaaagccagggccatgggagaaggcgagctcctttgaatagagggtcagcaaaggccaggatgacagagaggggggcaccagggccaggtctccttggaaagacctggggacagcgccccaagagtctcatgtgggtctcgcccttcggagtttaactcaagctgtctaggtccccacacatcccagggtttcctcctccaccttggacattagggaacacaaggaccaggagagccgggctagttgaatgggaacgggggcccaggcttcgatcccaggaataagccagggaggctgccagatgctcaaggctgcatctgggtaagcaatggtcactgccatgggccccatgcttctcctaacacactggccaggtgcctgtgtgcccatttcccacccaccctctcctccctgcagtgagtggtagctgctgtgatagaggtcatgcccccattctgccttcagccttagggtccagcctggccctgggcaagcccctccaccctgggcctctagccaggaccccactggtccccagaggttctagaatgcaaggattcccaaaagcctttggccaccaatgccccggctgtctgacatagcctgtcctgtcgtgaacagttgggattagtccacatccctccagatgcaagggtagaaggcgggtccccttggacagcttggagggctggacatgaagttgttcccagttggaagtctccagaaaataggcgagtggggcggggggatggggggggaattcccagcctcaggctctaaaattcccagttagtctgtggtgcagacaggactccctgcctccttgttcagggaagtaggggaggatcaaggccacactgggcaccaggagctggaagaacaagagggtctctggcccagagtctgggatggggagaggcagagggggcattggaaattggggacacatctttgaactgagataacagctgttgccaagaccagcacctgggccaggctaaggaagggcagggctaaaggtgggggagctaagggtcaggcagggccttgaacgccgtgttcaggaggctggcctttatccctcaggacctggggagccatggaaagatctgaggagcaggcattgggcacagctggacactggggaacgggtgacacaggggcatggatccagcccaactctgataaggaacagcagagttccacaggaccatagtggcagaggcagcagtgaggacttcttttttatttatttgtttgtttgagacagagtctagctctgtcccccaggctgcagtgcagtggcgtgatctcagctcactgcaacctccgcctcccgggttcaagcgattctcctgcctcagcctcccgagtagctgggactacaggcgcatgccaccacgcccggctaaattttgtacttttttagtagagacagggttttaccttgttagccaggatggtctcaatctcctgacctcgtggtccgcccacctccgcctcccaaagtgctgggattacaggcgtgagccaccgcgcccggccggcaatgggggcttcttaaaaaagagggaggctgggcccggtggttcacgcctgtaatcccagcactttgggaggccgaggcgggcggatcacgaggtcaggagttcgagaccagcctgaccaacatggtgaaacaccgtctctactaaaaaatacaaaagttagccgggcgtggtggcgggcgcctgtaatcccagctactcgggaggctgaggcaggagaatcgcttgaacccgggaggtggaggttgcagtgagccgagatcgcgccactgcactccagcctgggcgaaagaccaagagtccgtctcaaaaaaagaaaagagggagtgtgggggtggggcccggagcgctccaaggggcggggaaggggactcccaggcccgaggactcctggaagggaggtgagtgtggcgctgaggaagcggcgggacggatgcgagcccgggaggagcgcgctggggggccgcaggcgggggatgtggcgcggtccaggcccgtcgcggcctcgtcctgacagggacacctgcgggatcgtccttccaggatcgcctgcgggcctcgcgggccgatgcctcgggtccccctccggcctcggtttctccgcgcagcggggcggggcgggggcagcgcgggtctcaaagctgcctgcagggggcgcccgtgagcggcgcggccggagccggagacccagcggccgccgagacagcgggagccggcgtgcgagcggcaggtcagccggggtgctaggtctggcgtgcggggtcctgggtgccgggtccggggtgcggggtgccgggggtccggggctggtggccgggcggcgtggggccgtcgggggtgcggggccgggaggactgggaggctggggttctgctcccctcagggttcctttcccgccgccccgagaccagttccccggcgcggggtccgagtcctgccccgcggcggctgccggcactgcctgtgaagggcccaggcacagtcacgtcccaggcgcagttgcggcgccgcgtgcgggaccctccgagctgtcccaaactgcaccggaaggcgcgcaggggtaggcggggagggaaggcaagtgcggcggccggcgcggcgcggggtgcggagccgcaggtagcgggcggggagcgtccgtccgtcagtccgtccgtccgtccatgcgccgcagaccggccccgcgcgctcgcatgaaccttcgcgagctcctccagcagggatggaccgggggcgcagaggcgcttcctgaggggtggcgggccgggccccggggcgagggagattccccaggtggaggagccgggcggagaccggttccccgggaaggtgaggcgcgggcagagatacccgagcgcccgggacgcgccgagaaagggggaatcaggaacgctgggccgagcgctggcgtcttccgtggacagtggtggcgggaactgggtttgggggacccaggagacgacgggggacggatgggggtgggtgcgcgcctcggactggccccggccgtctgtctggctgcccggagcggaggtaggaatggcgggaatggtggcggctctcgagggatttggcgcaaggcggcccaagggcttgaggaggaggccgcgggccggcagagctgaggtccctgtgtcccgcactcagactttagttgccccgactgtaccatgggaggaagagggagacccagggctgggtcctaggctgggggagtcggggccctgcaaagacgcgcaggtgtttgtggcccttgttggagggtgagccgcaggtcaagccagccctccgtcgccatcctgaagcacctcctctcttgggctctgccacacacagggccttctcccctattgccaggtgctcaggccgcctccaccctgcctctgctgccggctccccctgggttccccggcggggcaccctgccgatactccatgacgcgccagggctgccccagggtgccccagccctggggaccatggtggagggttctgtggagcaccgcgggcctgggaagctgttgcggggtcggggcttcctcactggccctgctttggccgttcctggaggccttgggtggggctgggaaggccgggccctgtgggcagcaccccccccccccccgcccaacatcccggcagatccatggcaggggcgcctcacaggctggtccacggccacggtgtcagtccctccttgttctgcgcttgctttttggggtctcccagcctctccctagtcctagagtttctcaggcaaatcccagccactacccctccatccgtgtcccctgtttccccagtgctgagctggctgagctgtgagctttcctgctccttgcctcaggaagccaggggcagcccagtcacctctggccagaggcgggccttaggccaaggctgacctggctggtctgagagctgtgctgggcttcttcccatatcagtctgtgaattacagatccccaaatatgccctgcgtcgcgatggaggagggcaatcaatggcaatgactgcctcatgggcaacgcgatgtgctggagatttcagtgctctcgtctgggttctggtcttgcctcctcgacccactcgctgagcaggttgctgtcccggggaatctgatatctcatctgtagaacaaggatgatgatcttagcaatgcctaatgtggaaaggccttggcttgggagcaagtgggggaaggtttagggcagaccagagggccggtgaggggtgtgtgctggagcggggaacccgggagggagggtgttaggcttgagggtcaggggacaccacagggattgctgttggcagagggacatatgaatggtagttggcctgggagccagcatgtgacttgagagcatcacgtcctgcaaagtccaggtgaggcctgggcagtgcctgctgtgtgggaccacagcccctggtggctctcagctgtgtcctgacactccaaagaaggtcttagtaccctctcacagacctaatacccgagccacctaaccccaaatgagctagaactgccttcccaaccgtgtttgcggggtctgtcttgtctattgcagcgcaaacagagccctgagcacgcaggagagcagaggaaggacagacagaagatggatggatggatgaaggcgggaagcacaggctgaggggatttagggcatgtgtggtgggggtgctgtggagaggagactgcacaggcaggagctgagctggtgaatgggagggttctagctcccagaagggtctgggccattgacaggaggggcttggtcctaggaggtgggtggtccagaggttgcaaggagcagaggagcccagatggggaagggaatggagctggggtgcagagaggagcccccacacaactgcccacatcctgtgcagaacctggggctctgggtggtgggaagaggcagtttcatggcggaggaggcctgggcccctgcagcctggactccatggatctggccagggactggggaggatcaggtggagagaggagcagcagagcagctgcccctcgtcccagcacaggggatgatgggagcccagggaaggcaggaccctggcttcgggcattttctctgctagaatctctcgatacctctctcccttcaccttctcctccaagtctcacccagatgatgtttctgtgagttgccatggggattctctcaccaccccccgccaacaccccgcaggggaagcttgttccaggagtcactgggcaggggctgctgctgctcttctgtgcccactcctcggatgtgccgctgcagccctggtctctggcatcggccgtcacctggtggagaggctgccggagctggccaagcagagggaggccgatggtgccacttggtgtctcctctggcatctgggcaggagacttctccccagaggccccgggctggtctgcccgtgtcacaggaggactcgcctctggtccctcagtggcctctgcaaaccctgagccagcctgggggaggctgctcagtggggaagaagcagtggccaggctctgcttggtcaccctgccctcctgtcagcctccggggctgcctcgtcgcacctgcccagggacccaacagccggtcctcacccctcccatcctcattgcagccaccctggggcattgtgaggccctgcacccagcactgccccttcaagcctcccacagggtcccgcccaggactcctgggctctgtgtccgcggggccatctagaaacactcccttgtccccccttcagcggcatagtacctgttgcccgccatctgagggaggtgcaggtgccaatccttcacgtgacgtgacgtggctcaccacagcctgtgtacatgtgagcagccgcgtgcagaggggaagctctgcctgggcctcagggactgtgacatggagcaggagccgcccccagccaagctgctttcagcacagcgtgggcccccagcaccttggtgcggggtgcggcccctcggaggagggctgtcaggtgaagcctcgtgtgagggggtgagtggcccccaggcggggaggagggggtgctgtggccttcctggcccctagcctggacacatgggggtgtggggagcaggagctggggcccccagcactggccccggggctgcgatgtgggggctgctctgtgaggcaggctcagagccttagcctccagctgcagggagctgggtcttggccccatcttgcccacatcctgccaccaggagcagagagctgcagctgcacccgggctgtgggggagggatgccaggtgtatctctgggtcccgggcccagcctgcacccagcgcctgaagtaagggccaccgggcagccccggaggtcaggagggaagtggagcccgtgctgggtggctgcttaccactgggcagtgaggaaggcacctgcgctgatgagtttggaaggggtatggggatcctggggccctgggttctgggaggttcatgcccaggcccccctgggccatcccaaaagccagtcatagtggggcccacaacctgccgtgccctgccgagctcccgcaagccacttgttgatgcttctcagtccaccccatgcctctcaaccgtttcctcctagactaggtctcttcatggcgtttctgggagaattcctcagtactagcttcagatccccagtcgtctcttccactgtacgtgtgcctgaagctcaccacatcccttacttcagtccttctatttttcagtccctggattttgtattatttcttgttcatatccacctgtccttgtttcatttccgccagtcggttcagaagttctcattcttgtctacggatgccattcctttctttgcctctttggagattctaaaggtctctgaaatcattattagattactgtattaccttccttcctactggaatgaattcacctccatgttttttattctgttgcttacctttcttagccttcatatacctcttgcgctttgaaattgatttgcgactcctcttagctgagccaatgttgtggagacagggagtggcctgcagtgcctgaaactgcagggcagcagccgcctcccaggaatgtcctgggtcctttcctcctttgaggtcccctgccatatgctcagatggggccaggcacagcaacgggggcacacctccctttggcccagcagttggggtgctgccaggcctggtggaggtacttggtaaacatttgttatggaaaagcagcaggagggttctaaggctgggattctggagcccaggaacaggccaggcatggctggagcgggtccgagtccgtgcactgtgtcctgtatgttgctcttagccgcactcaggagcagatgtgcaggtcactgcctagaagctggtgggcacctccgtgcagcaggctctggggggtatagccaccatctgggcatgtgtacagagggccttgctagtgcgacatatgaggaaccagaagatgtgtgggttttgattaaatggagttttaattaaagtggccaggttgggggaggtgaggaggaaggcaggaagcagcagcagttttgagtctgaccgcgtggaatcctataaggtggttctttcaagaggcattatgcacattccgcagcatgtgtcccctgtctgtatggggcagcatctgccctctgatctgtccccaacaaggggtaatcacagagaagtattacattattaatatttaatttcccctcctggttagcaacagatgactcaaggagtaattagatgcacagagccaacagagagggataggaaattgccagatcctggccccgccccctccccggggcctctgaccttcctgtcactctgggaggcttctgagggaggggagctggaggcccaggagccttcctgctgctgtgctctctgtgcgcacggccgcagccctacaccaccttccagtgctcttggtgaggctgagagaggtcgcttcgtgcctttgggcctcagtttcctcatctgtaaaatgggcttcctgggaccagcaagatcacagatgacagtcatttcccaagctcctaagcaggctgcacaagctgtgtctgagggtccagtgcagtgcctggcctctaggcaggtgccccctgggacgcgtaaggtttggcagctcagcagtgactggcatcgtggccagctgactctgtgttgctccccagttacggtccacgacacattagtagcttgaaactgggcacaaggggagaatttacaccacagaaatcaggcaaagcctgtaagtcagggtgcccccggccaggagctgatttgccagcctacggctgggtagctcccaacctttccccaatgaatgcactcctcttcccctgtctgccccaaaggtgcctctgactccactgatctgctttgctcagggccgagaaaggcacagctgagagtggattctggcttggcaggggcccaggttgcctgtgggtccgggcaagcctcacccgggatgtgctggcagcagctgggagagcctgcaggagtgcttaaggaggggctgagggagaggacgggcagcgaggtggcctgtgtggaccctgctggcaggagccgtgggtgtctttagccccgtgtgaggccggcctgggcagaggggtctgttgctgtcactgaggctggtgggcagcaggaaggtggcttcagtatagtcaagaaggttatcggtatctagtgctgtttagcatggggacccacagcacagaaggtggggagaccctgagaacgggggtacacaggcaggtacccagggctgccagggaagccttgccaaacagaggccctggtcaggcttctcccaaactgggcatcccagctggcatggcaccagtccagcccgtgaggcaggcgccgatgatttgaccccaccagcagggctctgggtgatgggactggggagtcctccttcactttggcagacgtgttatgttccaccttgtttgcccccagcaaggcccttgaatctggagcgtggtctggggctgcatcagccttctagcctgggatggtcagattggcagaaggctgtggcatccttcaatgcagatgccctagagagggccgtggtgggaggcaggatccctgggtagaggcggctcctcagtggcccactgggcctcactggacagtcgcctgttgctgctgctggtggtgctgggcctgggagtccaccttggagccacaggccaggcacctgggtgggaggcagcccggggccagcaccagctccacttgtacctgttgggcaggggctatcgtgagtcaggtgggccctggtgagtactgctcagggagagaggccaagagcatcagggataactgtgttccttgagtgtggccagggatggtgccaggagagctggtctggtgcatccctgccaacgacacactttgtgaatggctgcctggcaagtgctccatggaaagcaggggcttgggaggactcggccctctccagctgctgcaggccctccgttgctgcagggtttctggctctgctctctccttcctcctcctgcttctgtgtcaatgctccattcccaggctcctagtaggggcaaaagggcctgctgggtgcaggagaacctccagtcccaggtatggctgcagcccgtgccaatcctgttccagccacttgaggtgccgacagcattggagttggagggaaagttggggtctgtgtgtttgagctctgtcacatggacaatggggtagaggggagcctggccctttgaacagggctcaggaccaggagtgacttcctctccaggttgccagtcctgctccatccctcatgtcctggaagagagagagagacgaggtggctgcccgagtccacgtgaaaggcagcctctgacctcttgtccccaggcaggtggtggcggctggcaacacactcatagggccccatgagggttcaggattggagggggtagatttgggggcctcttagctctcaaagaggggcaatttaacgggcagaggtccatttggatccagaccattcacaggctcgaaggggacactgggagttggggctgggctcaggcctgctggggaaccaaaacttctgcttctgaggggtgtcagtaattccattttgactctgggggagccattttaaatctgtttatttccttctcatagaatcatgggtgagagctggcatggcccctagaggtcatttggggtccagctgcctcaccgtatcaatgaggaaactgaggcccagaaaagaaaagcatttttgcccagagtccctcagtgagtcctggttccgtacctgctttctgccagggaccaaactcccgttagtcattcctggtgtcagccaggcagaggagcaggtgggggagagggcgtgggaggagggaggtgaggcagctccctccgagtggaagctcacagtcagctgcagcgccgcccctgccctgactgcagctgactggcaggggcacctggaggcagcgggttcgggcgcagtatgagagggcttaccctctgcggcagtgggagacaggaccaggcagctccccacatccttccacatccgagctccaggggtctctggcttgtcctttcacagggcggctggtgtcccttaggtgggtgctggtagttcctgggagagttgacgggatggagcaggccaggggggctgagaagttggcctggcgagagaaggtgggtgggactgggagagcctgggcagggaggggcctttctgggagggagtgtcatggggctggccgagatccaggacccaggagactggccaagctgccacaggaggcctgagaggctgagcatgggggggccaacactgacagactttaacaagtttctggctcccccaggaaaaaaacagaccacatctgatccttggccctgagtccagagtgggaggcaccgtgacaacaatgcgcagagcagggaatgcagggagccatggatagtgctggggtgagctggagtcctggcaggggcccagctagggcagtactcattctgcagagcctgggagaaggggctgcctccttgggaggggtttgtgtgggagtctcagcgggaattctattggaccaggggaaccagccttgctcagtgacttctctgggtgtcctcctctaaagtgagggtcaaattcccacctctctcgcctcctggctatgaccacagcagaccaggcagggcatggggctaggcggggtcaggggccatcctcaggctgacacctggcctgtgggtagggtgggatctgaaactatagggtcttcagggggccaagtgtggggtaaggggtggcactttccgcagggctcgccctctgcagatggttcagcttctcatcggctgtccctttgcaggtgcctcaggaaccctgaagctgggctgagccatgatgctgctgccagaacccctgcagagggcctggtttcaggagactcagagtcctctgtgaaaaagcccttggagagcgccccagcagggctgcacttggctcctgtgaggaaggggctcaggggtctgggcccctccgcctgggccgggctgggagccaggcgggcggctgggctgcagcaatggaccgtgagctggcccagcccgcgtccgtgctgagcctgcctgtcgtctgtggccatgcccatcatgggctcctcggtgtacatcacggtggagctggccattgctgtgctggccatcctgggcaatgtgctggtgtgctgggccgtgtggctcaacagcaacctgcagaacgtcaccaactactttgtggtgtcactggcggcggccgacatcgcagtgggtgtgctcgccatcccctttgccatcaccatcagcaccgggttctgcgctgcctgccacggctgcctcttcattgcctgcttcgtcctggtcctcacgcagagctccatcttcagtctcctggccatcgccattgaccgctacattgccatccgcatcccgctccggtgagcagggccggggttacatctgtgcaaaggctgttggtgcccaggctttggtctgtgcccggagccagggtgagcctgggatcagggcctggtctgcagtgtcagcatggtgagctggcgacggggccccaggctcagcaggggctccccagggccagcacgtggccagcagtcatgccgaactgactgacccctatgggcgcagggcagcctggccctcccaggcggcctgggttcccctaggctgcctgaggccaactgtgctctgctttttggcagatgagtgtggccagggtctggcattgggcttagcagggagctgtggtcccagtgacccacgtgctgccagcgggtgtgtctgggccattcctcacacacaagcaaaacttcccggatgatgctggggtggagtggggagccaggggaaaccataggacctcagagttaggagccgcccgccacctgccttcccccagatcctctgggccagccttgcagtgtgcacattaggaaaatgacccagagaggggaagtgacttggttgaatgccacagtgagtcacttggacctatatgcaaattctgttgctcctcaagtcaccaaggactcatcgtcttagaggcagccagtgtgctcaggggctggctgttggaggggatttttatggtgaatcttttgtgaagtgacttcagccaagtaattgtgcaaatgaagattttcccagaggctgaattactcggcatggattccacctacccaggccatagatgaggctagaaagtgcatccctcccttggggacgtcagaggccttctgccccacctcctggcccctctgccacagagctgggttccacagcctgggtggttgtgggccctgaggccatgtatgaggcttgaggtggtgcctcttgagagtcagggagcagggtgcaccatctctgcggtgaattatctgaaactggtgggtgcctatctaaagaggaagccacagcaggttgagggtgccccagcaggaaggaggacccagctagatgagcaaatggaaatttagagcgtcaaagccaaggggcccttagaggtcatttcctctcatcttcgggatggaaaatgagcctcagagaagacagccagctgtttccgggccacacaacgagttggtagtggagctggggcgagtcctggaaagaaatgtggcctgatccccactgtgacttcagtcactggggagcggtcatgagcagcctgtctcgcagagcctgcaccaggtggctgtccctgtcacctgggctctaagtgggagcaggagctgcactgggctgctccagggaaggggaggaatctggacctcacactgccctgtcagatgctctctatcccaggagagtctagaaccctcggcaaaggagaaggggaccctggccagccctgagaggggtggaattagggattgtcggactccaagtgcagtctctggtgagcctccatccattgctctgcgacgggcagagcagagtttaggttcgtccagtggcagctcagaacacggaggcccaggaggggccctgtctgcaggtgcccaggtgggccagagaacaaagcactggaggggacttcagggaaccaagctgagtctgcacactgatgggatgctctatggggaagcagaggccaagctctcacttttttctctgattcaaagggtatgatcagggctgccgttctcaatttaaaggagctcgactttttttctcttttgtctctccctttccttctctgttttctgagagttgagagaatgactccctatgtagtaggacaggatgtgctgtgtggctatggaaagttagctgcctctctctgggcccatttcctcatccataaaataggacaagtctctctgcccctctgagctcacaaaggtgttctgaaggtccagtgagtggatggggtgacagggaccctgaggagggttggaggcgtggggagggtggggattcagatctttgggttcagagccatggacctgccccctatcctctacccatctcatcccaacttccttggagctggaccttagttccacccagaccttgagccatttgactctgctccatgaggctctgcaaggcttaggctggtctcttctgcagggggccctggagaggatgacgacgatgatgttcatcctcccttgagggcagagagctttgcagttgccaaaggatgtcagctcagcatctcctgtcatcctcttggcctgcattgtggccaggcggatgttctgaccctcctgttactcacaaactcatggggaggccagagcagggaaggacatacgagtgtctcctgatgtggatggactccagggcccttcaggctgttcctggcccgcaggtcccttcgctttcctgttcctcagggcccctgggcctctgggcatgtggaggtgtccatgtgggctcccgagagcaagcggggtatgaaaggaacttggtgacactcctggccggcgctggagtcacagcctgcctcaggatcctccctcctcctttctcagctgggaatccagcctcctctacgtgccgtttcctgctccactcagaaaggtccattcggctagccctgggtctagcctcaggcctgccccactctccattaactttttttttaaaaaaaagaactcagttttggaaaaatctgttattttccaagttcagggaacctgttgggctagcacagggcctagtcgaggaactctgtgagaaagacttcaggccagaggcagagatgtagctctctgtgttcccagaggatagggaattcagggtgagagacacaggcttctttttccagttcccaggggatttttgcctcactgtcccctccctggctctcacagcagcccttggtggatgttctcgctggtttgaggaacaggccaaggtgcaggtggcagctggtggtgaggcccgaagtcctaacacttctaagagggcaggattgggagagagggctccctggaggaggtgtcacccagtgggtcttgcaggacgggcaggcagggtctcactggcatgagtgtgggggcaggtgtgtcaggaggggggcaaagcctgggacaagaccctgaggaaggaatgagcatgtgagcactgggtagggaagggtggcctggctgcctagtgacagagagagatgaacagagtgggcaggaaaggtggaggccaagtcaggcctgttcgtaccaggggaaggaatggaggtttccctgtgggtccatggctcttcaattcttggatcaatgactcctttggacaacttaggaaggctccacctactcctcaggttgggacatgtgcacataaagccccagctggaatcatggggcatattcttggaccatagggtgagcccccagtgtgggtaatggagatccccagaaaggggcagcctgcaagccgggggacacagagctgcagagggcacctccacaaagggtgggcagcagctctgggacccacattctctgacatgcctgggcaccccagagtggtggtgtgtcacgctagacagccttggcatcccttccagctggatggtcaatgtttggggtctaagacggcaagatgtgagtgtgttggtcacagatgcagcccaggatatgctgctgggcctggctgaggctcagctgtgattccatttgggccctgatgctgtccccaccccgtgggcaccagggtccagggctctcagcctatggagatttcttttgaataaacttagtctatttgcaatttaagaaaaaaaaaagtcatgttttgcccactctaaaacattaaaaaggaacaaaagagtatagtatagtagaaagttgtcctccataccccctgtcccccaccctcagttccctgcctgcaaggccatgttaagaatccttccagagatattctttgcatatataagcaagtgctattaatgtatgttttgtttctgtccccacacgggactttctttgcagagtacggtggaagactccccttgtgggttcccttttctgtacaagtcaacaattggacagaccagggatttccatactgtgttcccagaagccttcgggttggctctggtgtccccaccaattcactgattcaataaacatttaataagccccttcccttccccagcagcttcacctctgtgactgcctgggaatgtgggcgacaaggtttgctgctgagaacagtttgaaaaccagcaaagcaggtggcccagggcccaggcagctctgcaacacccctgtggctgcttggctctgctctgttgcctcaaatgacaggaaactcactattgcctgaggcaggccatctctcctgtgaacagctcagctgaaaaactcttaacctaccctgagttacaatctgcctccctataatttccacccactgattctccattctgcccttagagggcagagtgctgacaggtccacgacttggtcccattttacaaatgaagaaactgaggctcagagagacaaagttttaaaacattcctgttaacagggccagaacccaggaagggatatgcttttctcaggaataatgtcaaaattaatatagcttcccagtcaatgaggactatataaattactatttgcaaagcactaagaacagtgtccggcacagagtcagtgctatgtaatgtagatgtgagaatgagagagcctgagattttatgtttgcgagtcccacaggaggcagggcaatgccaactccctgttgcttggaagcaatgggcaagtctatgaccctcctgttgaggccctgttacaggtaaccaagcccccacggaatggagctgaggagctcctgagaatgggcttgtccggttactgtttggattcagaactgacctaagagattcagaacagacagactcgccttggcctgagttgcctctgggctcttggaatgtccacagcaagtccattcctctccttgggcctcaatttacccacctgtaaaacaagaggattggaccacataagagatcggaagccaccagggtttctctttttctcttttatttgaattagttgacaaaacttaaatcttgggagattttacccagaaaatcatctccccagccccacctgagatctggtaatagcaggcgtacgttttgcatggcgctgaagaccaggtaaacgccccaccagctgcctcctgtgtgtgctacctataggcgcctgtttgctacccgtgaatgagatggtttctgtggatgttcccagctccgcagttaagtagagcacatccttccccttgcacctttttttttttttttttttttttttttttggagactgagtcttgctctgtctcccaggctggagtgcagtggcgcgatcttggctcactgcaagctctgcctcctgggttcacaccattctcctgcctgtctcccaagtagctgggattacaggcccccgccaccacggccggctagttttttttatttttagtagagacaaggtttctccatctcctgacctcgtgatccgcctgcctcggcctcccaaagtgctgggattacaggtgtgagccactgcgcccggcctccttgcaccttctgagtgtccctgtctcggagctggcaatgcagagatggatgtaggaaagccctgcccccgaggggcccagatgtggtggggatctgctgcacttcggtaggaaacttctttgagatctctatcctggacttgaaggatgggtagggtttctgccaggtagaggggagtgtagtctggtcttgccagaatcaaaactgttaaacagaagtcatccctcagtgatcatcaaggttgccttcctaaattagggagactttttttttttattgtccattctttcatgaaatctaggccacctttcctacagggctgaggtctgcttactggctggcagatccagccatttcccgagtatgagactgggagtcggtaggcttggatttctgtctggctctcactcaggaagactgagtgatttcgggcagattactgtccccctggacctcagtatttccttgcaaatgttaagatggccatgtaaatgttaacaagtaattctctcatttctctccagagggctgtgggtgggtttggaggggagaaatggcatctcctttggcctgggacctcctcccctcttttaccctccatgctgcctctcctcaagggcttctggagtccccaagtcaaatggcaaatggggaagagaagacagggtatggagtacaagaggcctagatcctctataggtctgatctggctggtgctgcccctagccagtaaagccaccctccagaccccttcaagcctgttgtagccttaaccaagatcaaccaacatggaggtgactgatcttggttaaggctgcgaccaacatggaggtaattgatcttggttaaggctacgacacgtttccctttagagaaaaatcatgttttccccctcaaaaaatcatgcgttaatttcctccaaccaaactaagtcccaggactactccgaaaactactcaatgaccatctgggcatttgtacatgggtttccatttcttggatgcctgctctcctgttacctcccagaagcctgtgaaaaaggcaaggcatattacttccacttaacggaagaggatgctggggcgaggtggcaggaaatgactggtccaagaccttacagtcaggaaatgtggaaacgggtgctgctctggggttctgaactcttggccctgcttaaccctggcttctcagatctctgatgctggtctcttctccccaggtacaatggcttggtgaccggcacgagggctaagggcatcattgccatctgctgggtgctgtcgtttgccatcggcctgactcccatgctaggttggaacaactgcggtcagccaaaggagggcaagaaccactcccagggctgcggggagggccaagtggcctgtctctttgaggatgtggtccccatgaactacatggtgtacttcaacttctttgcctgtgtgctggtgcccctgctgctcatgctgggtgtctatttgcggatcttcctggcggcgcgacgacagctgaagcagatggagagccagcctctgccgggggagcgggcacggtccacactgcagaaggaggtccatgctgccaagtcactggccatcattgtggggctctttgccctctgctggctgcccctacacatcatcaactgcttcactttcttctgccccgactgcagccacgcccctctctggctcatgtacctggccatcgtcctctcccacaccaattcggttgtgaatcccttcatctacgcctaccgtatccgcgagttccgccagaccttccgcaagatcattcgcagccacgtcctgaggcagcaagaacctttcaaggcagctggcaccagtgcccgggtcttggcagctcatggcagtgacggagagcaggtcagcctccgtctcaacggccacccgccaggagtgtgggccaacggcagtgctccccaccctgagcggaggcccaatggctatgccctggggctggtgagtggagggagtgcccaagagtcccaggggaacacgggcctcccagacgtggagctccttagccatgagctcaagggagtgtgcccagagccccctggcctagatgaccccctggcccaggatggagcaggagtgtcctgatgattcatggagtttgccccttcctaagggaaggagatctttatctttctggttggcttgaccagtcacgttgggagaagagagagagtgccaggagaccctgagggcagccggttcctactttggactgagagaagggagccccaggctggagcagcatgaggcccagcaagaagggcttgggttctgaggaagcagatgtttcatgctgtgaggccttgcaccaggtgggggccacagcaccagcagcatctttgctgggcagggcccagccctccactgcagaagcatctggaagcaccaccttgtctccacagagcagcttgggcacagcagactggcctggccctgagactggggagtggctccaacagcctcctgccacccacacaccactctccctagactctcctagggttcaggagctgctgggcccagaggtgacatttgacttttttccaggaaaaatgtaagtgtgaggaaaccctttttattttattacctttcactctctggctgctgggtctgccgtcggtcctgctgctaacctggcaccagagcctctgcccggggagcctcaggcagtcctctcctgctgtcacagctgccatccacttctcagtcccagggccatctcttggagtgacaaagctgggatcaaggacagggagttgtaacagagcagtgccagagcatgggcccaggtcccaggggagaggttggggctggcaggccactggcatgtgctgagtagcgcagagctacccagtgagaggccttgtctaactgcctttccttctaaagggaatgtttttttctgagataaaataaaaacgagccacatcgtgttttaagcttgtccaaatgagaa

SEQ ID NO: 2 - DNA, 23649 bp, Homo sapiens
attcattacccttccctggatctgggggctttcggaatctcgacctccccttggcctatctcctgcagaaaaattagggtgagccccatcctcgatctgctccgccaagttgcgggaccgcggggcgtggcacgctcggggcaggcggtccgaggctccgcaatccctactccagcctcgcgcgggagggggcgcggccgtgactcacccccttccctctgcgttcctccctccctctctctctctctctcacacacacacacccctcccctgccatccctccccggactccggctccggctccgattgcaatttgcaacctccgctgccgtcgccgcagcagccaccaattcgccagcggttcaggtggctcttgcctcgatgtcctagcctaggggcccccgggccggacttggctgggctcccttcaccctctgcggagtcatgagggcgaacgacgctctgcaggtgctgggcttgcttttcagcctggcccggggctccgaggtgggcaactctcaggcaggtaagtggcgcgagagcaccggcgggctcggcacctgggagccggaacccagtgcgcgcagcctcggagggtatgggcacggtctcaggcggcgcggggttgtgggtgctgcccccggtttgccaggaccacctgggagaggggcggtcaggctcgggttatcggcgtggtccggccgagggcggcattccgggaccctcacgccacccttctccagagcgtcgccgaccctctaattggtctccccagaagaggctgaggccgaaacagtagttcacacttctgaggggccctgcagggaggggagcagggaacttcattctgtaaacaggaggtgcttggaggtgggggccttggcgggaagggtctcggtttgctcgccaaccccctgccccccacccgcgccgatttcagctacccctagtttcgttgttttgccgacagggcggagctacagaaggttggagggggttgttgttctctggtgttggaaaaacaggagcggcacctcctcttccgtgagtgagcctgccctggggaggtctgagattaaccagagggccaagttcaggtgacatcaggcaggaggcccaacagaggctggcgccccctttcctcagtatagcagagcttaagcaacatctctttgtcaagacccaggtcaacacaactcatatttattgagcatctactatacacaaggccctgggccaggagctgtaagggcaaggatgtccagcctctggtcttttctctccccaacctgaggatcaagagggcacctctgctactttctaagcctcctgccttggggagtccttcctgggctcagcttgtgcctcccgcccccattttgcttattgtctgacactgtctctaggaccctagacagagccccggattgctcttctccagtcctcccccgactcccatgctatctgagcccacccctttggggtgtctctgggaccgtggacacctgaggactgaagttctgtggatctcctcccctcccctcagatctcagcttggggtttggcacagccagggccccttccccagtgtgggagtggaagaaaccacctgtgcttccctcacagttgctgggcctaaatttagatcctgggatttttagatgtgaacactcccagctggtggaggggggtggtctggggactggcgtgggagggagcagtggagtgactgtataactgtcccatccagactcctgcaatcttcacccagaaacccaggagtaccagagtctggccaccctccctggggaggcaggaggcaggcatggttgggtctctttaccctttatctgggtcctgcagcctctgggcatccggccctgtctcagtccttctatagcccctttgtcctggctgtgatgggggtgggggatgttggaggggaggcctctggttgaggaggggctggagattctggctctatcccacccctagtgctctctaccaaaggagggcctgtgacactgcccctccctatgctcccggttcctgggtacagcagggatttttatgattcccttcccctgccctgctccccaagctgcctagctcctccccagaggtgttgtttgtgctcccttcctgcccaggccctttgccccctgtttgtgtaatatggactttaccctcagggtagcagggaactgggctacctctaacactgtagccttccaagcacagacacaaagtctgcacaaacacttatgggcacgtgggatagatggggccacctgaaatacttcctgcaaggaaacccaactatagattcctgagccagcaggaccaatgtgtacgtgttcgtgtgtacattgtgtgtgtatgtgtgtgcccacactactacttccctgtgcagaaagcttggctcctcccttatctggggagaagtgttggcactataacttgggaaagggggtatcctgccaggaaggggattggggtggggctgttccagaaatgactaaccttcctagtctctttcatttcaacccaaggaccctggagttcccagctcctctggaactagctctctttgctgggactagccaaccttcatggggagtgataaggagccctccaaggtcaagaagtcagactaggggtgtatgttataggagggattggggcctcaccagtctccctccctccattcccactgttgcctcccactgagctaccaccgcctcagggaagggtggctggaacaggtggtatctaccccctactccccaccccacacatggtctttccctgaaccagaggaaagagactggggtagggcttcagagtccaggacttcccatagcccgttgtccaccacatttgcaaagaagagtgaactcccaaggctgacatgccatgtacctctagtctaggctctcccctagtgtgggtgaggattgccatggtgaaaggctttttcatgaacctcttctaacaatgaaattgtgtggaggctcaatatggggcatctgctactatctctctccaggttcctctgtatttgctgaaaaatactctagggctggaaagtgatgctgaggttgctagagtgtgttgggatgggggagagagtgagaaggaaaccctgagtttaggaaggcggggaggcaactagctccttatctttcagctttaaagacaaagctcccattgaccccccctcaccccagcactgccagagctcccccctctactgaggtcacttgtctgagcccaaggcttgagggtggaggggagtgctgctgaggacggggtgtctagggacagggtggggcagcccccctcctggatagaatcgcctcattgtgggctggactgtggccccaggcactgcccccaccctctgcccccatcccaccctcagtagacacaataggggctgtgtactagtcccaaagagatatttattccaggacctagagagaggcaggatgagggtagagaagtgagtgccctagttggagggggagaggagggtaatcaaagttgcggccttttcctaacttctcttttctagggagagaaacaaattccctgtcttccttctcagttaaccccttagtacccaaaagaagcacagaggggtcccaggttgaaaaaggaaatcttttcaccttcccattcatggaatggtaaggggattctgagaagagagaaagctctcaggccactacagcttctgcctatcgcttgtgggagggttggaggcaaatgccatctgatcctgtctaatgtaactggaagagggcaaccaagggggtgatctttggggatggcagatgggctgagaatttgtgtccagccctcagccactcttccctctgctttgaacagtgtgtcctgggactctgaatggcctgagtgtgaccggcgatgctgagaaccaataccagacactgtacaagctctacgagaggtgtgaggtggtgatggggaaccttgagattgtgctcacgggacacaatgccgacctctccttcctgcaggttagtgagcccaccctccttcctcaacctgctcctctttattctcccctagaaccctccttccttcttcagggctaccttctgctggagttcacccttcctaagactcaggagttcctaagattcaaaaccgtgtatttatggggacagtggctgtcatctgggacctatggtctcactgttgtagccagggatatatagggggcagggtcaggggcaggtggtgttctgtggatagtgcaaggtcagcagggactagtgcagagagaaacctgaggaccaagaggttacctggggagatgaggaaggggccctactggtatgaggcactttgaggagaaagctgcctgtcttcactcccagaagtgacacagcagtgtgacacagtctactccctactcccaaataggaattagcaagagttaaggccaggtgcagtggctcatgcctgtaatcccagcactttgggaggccaaggaaggcagatcacttgaggtcaggagttcaagaccagcctgggcaatgtggtgaaacgctgtctctacaaaaatacaaaaattagctgggtatggtggcatgcacctgtagtcccagctacttggagggctgaggtgggaggattgcttgagcccaggagtttgacgctgcagtgagcgagattgtgccactcgtaacagagcgagaccctgtctcaccaaaaaaaaaaaaaaaggccaagctcggatcacctgaggtcaggagttcgagaccagcctgaccaacatggaaaaaccacatctctactaaaaatacaaaattagccaggtgtagtggcacatgcctgtaatcccagctacttgggaggctgcggcaggagaattgcttgaacccgggaggtggaggttgtggtgagccaagatcgcactattgtactccagcctgggcaacaagagcgtaactccgtctcaaattttaaaaaaaagaaaaaaagaaaggaaagaaagaaggaagaattaaaacagttaaagagtctttaatgcctgaaggaggagaggagattgagattattttgccctgttgtctctctcatttacataatctgctctgtcacagtggattcgagaagtgacaggctatgtcctcgtggccatgaatgaattctctactctaccattgcccaacctccgcgtggtgcgagggacccaggtctacgatgggaagtttgccatcttcgtcatgttgaactataacaccaactccagccacgctctgcgccagctccgcttgactcagctcaccggtcagttcccgatggttccttctggcctcacccctcagccagcccaagactggtacctccttgatgatgacccaagactgctcactctaagtgcctcttccaaggtgcctgtcaccttggccgctgtctaaaggtccattgctccctaagcaatagagggcccccagtagggggagctaggggcatctgctccagggaaaggaaccctgtgtccttgtggggctggagtcagagctggatctgttaaccgtttttctaatttcaaagtacagtgtaccggaggccaggcctgatggcttacacctgtaatcccagcattttgggaggccaaggagggcagatcacttgagatcaggagtttgagaccagcctggccaacatggcgaaaccctgtctctactaaaaatacaaaaaaataaaataaaataaaaaattagctggctatagtggtgcgcacctgtaatcccagctgttcatgaggctgaggcaggagactcgcttgaacctgggaggtggaggttgcagtgagctgagattgcaccactgcactctagcgtaagtgacagtgagactccgtctcaaaaaaaaaaaaaaaaaaaaaaaaaagcctgggcgcggtggctcacgcctgtaatcccagcactttgggaggccaaggcaggtggatcacaaggtcaggagatcgagaccatcctggctaacacggtgaaaccccgtctctactaaaaatacaaaaaattagccaggtgtggtggcgggcgcctgtagtccgagctactcgggaggctgaggcaggagaatggcgtgaacccgggaggcggagcttgcagtgagccaagattgcaccactgcactccagcctgggcgacagagcgagactccaaaaaaaaaaaaaaaaaaaaaaaccaaagtacagtatacctggatgtccctccttccctaggaattctacctttactctcctaaaccaaacccctatgagctggaggaatataggggttaaaaaccacctgtccatcttctgcttctccatgtcccagtcagttggaaaacatatgggcagggcttgggggagggaatgttgagtcagaaatctctccctctctcccttcccctcccccactagctaaaccggatctggacaggtgactgaggaggcaggagtttcttttggcctgactcctcatcttataaagggagtcttctctgcagcttagatttaattggacctatctgtctgcctcattctcccactcctgagtctcaggtgtccttttggatgggtggagaggtaaggaagaggcgttccgctgcggcccttaaccctgtcacttctttccctacctcagagattctgtcagggggtgtttatattgagaagaacgataagctttgtcacatggacacaattgactggagggacatcgtgagggaccgagatgctgagatagtggtgaaggacaatggcagaagctgtaagtggccgtgatcaagattgctccccagtcccaccaaaccagagtgactcccttctttccatcatccttacattcctgatctgaacccgcctccccagtgaacaaacacctcaggtccctgactcagcagcccaccagggcagaccattccagtctcctggaatctaaaccacagaggaggtgtttcaagaaaaggagcaggccgagcatggtggctcatgcctataatcctggcactttgggaagccaaggtgggaggatcgcttgagcccaggagtccaagaccagcctgagtaacatagcaaaaaatctacaaaaaattaaaaaaatcagacaggcgtagtggctcgcacctgtaatcccggctactcaggaggctgaggcagaggattgcttgagcccaggaggctgcagctgcagtgagctgtgattgtgccattgtactctagcctgggcaacagagtgagaccctgtctcaaaaaaaaaaaaaaaaaatccctgagtactaagcagggaagccagatctttagactccacatctgttactcgttccactagaatatactcccatttccttggagcccaccttcccctgaccattcacatgcatatattcctgcatatattcagtttgcccaggaggaactaagttcctgggttgggactaggactaaggttggcatttgccccagtccctccccttcagctgcccagtgggtggtgtggaggcgtggccgcgccccttgttgacaggtccacttgagcccagccctgctctccaagggcagggagggacacagccctggctttttgcttcccgggattgaggtgcctgtgtactgacatcataccccgttgattaaaacaagcctttcttagccctgatggccccttgtgttgccttccttcccaaccaggtcccccctgtcatgaggtttgcaaggggcgatgctggggtcctggatcagaagactgccagacatgtgggtttgaaattccctccaaaaacttcactcatacgctttcatatcccttcctccccaagcctgggtcaacactgtgggggaggcatgagcagtggcctcagaattcagtcctaggagccctaacagccatgctttctctccttccatagtgaccaagaccatctgtgctcctcagtgtaatggtcactgctttgggcccaaccccaaccagtgctgccatgatgagtgtgccgggggctgctcaggccctcaggacacagactgctttgtatgtaccctttccattgcctgggttctgaaattgggatgtggcctttgaggaggaggtaggggtacacacgtaacataaatctgatgagcctccttttttcccaggcctgccggcacttcaatgacagtggagcctgtgtacctcgctgtccacagcctcttgtctacaacaagctaactttccagctggaacccaatccccacaccaagtatcagtatggaggagtttgtgtagccagctgtccccgtaagtgtctgaggggaaggaacaatgatcaacaatagtagatccaagattttagacaaaattgtggaagggaaaaagaatccagttggtgataaatagggagattggtgaatggttatgatcatctaaccactccagtgagtgacccttacgtccagtcctcccatgacttcagctatcacccttacttctgctccttgtagcaacaaatagtgaagagacttttgaatctatagggcagcacttaagggatctagggtggcagatggggacaaatccagtgcagagctggagggagcctaggcccagagcaagggttccattggtagctggtgatgttcctccctcatctctaatggtgtcctcctcctcttccctagataactttgtggtggatcaaacatcctgtgtcagggcctgtcctcctgacaagatggaagtagataaaaatgggctcaagatgtgtgagccttgtgggggactatgtcccaaaggtgggtaggagatggtaagaagttgtaaagagacagcctttcctctgagcctgcgcagaccacccccactgaacctctcttacatttgcagcctgtgagggaacaggctctgggagccgcttccagactgtggactcgagcaacattgatggatttgtgaactgcaccaagatcctgggcaacctggactttctgatcaccggcctcaatgggttagagatcctgccttccctccttagaccccagcccacgcacccctcacagttcatttcattggccaaaactttcctatgtggagctgactaggaatcaaagtcataaaattctagcctgttacaaaggacctgaaagaatgcttaacacatcctccatccaggccttcggtcccctcaggaacatctttgagcaattcaatatcgccctgccaaggaacaagggacaggaacaacatatcctccttcttaaagttttcttttttattcttttttcttttttgagatagggtcttgctctgtcacctaggctggagtgcagtggcgtgatctcgactcactgtagcctcgacctcctgggctcaagtgatcccaagtagctgggactataggcacacaccatcatacttgactaatttttttgtatttttttgtagagacagggtcttgctatgttgcccaggctgatctcgaactcctgtgctcaagcaatcctcccatcttggcctcccaaagtgctagggatcacagcacccaacctccttcttaaagttttgtaaaagttcttccttagatttggataaaaatctgtctccaggctgggcccggtggctcatgcctataatcccagcactttgggaggccgaggtgggcggattacgaggtcagatcgagaccatcctggctaacatggtgaaatgccatctctactaaaaacacaaaaattagctgggtgtggtggtgcacatgcctgtaatcccagctactcaggaggctgaggcacgagaatcacttgaacccaggaggcggaaattgcagtgaaccgagattacaccaccgcactccagcctggcgacagagcgagactctttctcaaaaaaaaaaaagaaaagaaaagaaaattctgtctccccatgacttttagctgttttcactcattctgctccttggagcaaaaagaacaaagggactttctagtctataggacagcatttaaaatgtgtgtgtgtgtgtaaaaaaaacccactatgaccacctgtttttttttttcctttaattttttattttgacataattttagatctacactaaagttgcaagaatggtataaaattccccatatactttttttttttttttaagacaaagtctcactctgttccccaggctagagtgcagtggtgcaatcttggctcactgcaacctccgcctcctctgcctcccgggttcaagcaattctcctgcctcagtctcctgagtagctggaattataggtgtgtgccatcatgcccggctaatttttgtatttttagtagagacagggtttcaccatgtaggccaggctggtctcgaactcctgacctcaagtgatccacccgccccagcttcccaaagtgttgggattacaagtgtgagccaccgcgtctggccccccatacactcttttacccagatcctccaaatgttaacataccacatatggccgggcacagtggctcatgcctataatcccagcactttgggaggctgaggcaggtggatcactaggtgtggatcacgaggtcaagagattgagaccatcctggccaacatggtgaaacctcatctctactaaaaatacaaaaattagctgggcgtggtggtgtgcgcctgtagtcccagttactcaggaggctgaggcaggagaatagcttgaacctggcaggcagaggttgcagtgagccgagatcgcggcactgcactccagcctggtgaaagagcgagactctgtcccccgccaaaaaaaataccacatacgctttatcacttctctctctctctgtctctctctacacacacacacacacacacaaaacacatgctattgtttttctggaccacgtgagggtaaattttcacacatggttctttcttacccctgttatatttcagcgtatattccttaaaaataatattttcttacataaccacagcatagttgtttgaatcggaaaattaacattaacacaaaatattatctaagctacagaccttattcagatttcactaattgtcctcctaaggtttgggatcatacattacattcagttatcgtggcacttcaatctcctttataacagctcctcaggttttgtttatctttcatgatattcttgatgagtatagattaggtaatgggcagcatgttcttcagtttggattagtttgatgtgtcctcatgattagattcaagtttttgtagtttttttttgagacaaggtctggctctattgcccaggctggaatacagtggcatgatctcagctcactgcaacctctgcctcccgtgctcaagcgagcacctcagccccctgagtagctgggattacaggtgcatgccaccatgcttggctaattttatatatatatatatatatatatatatataaataatatatataaatataaatatatatatataaataatatatataaatatatataaacataaatattatatactatttatatatttatatatgtgtgtgtatatatatatatatttttttttttttttgagacggagtctcgctcttgttgcccaggctggagtgcagtggcgtgatctcagctcacgcaacctccacctctcaggttcaagccattctctatagagacagggttgcaccatgttgtccaggatggtctcgaactcatgagctcaagtgatcctcctgtctcagcctcccaaagtgctgggattataggcatgcgccgctgccaggctggagtttgataagaacaccacagaggctgtgagctcagggcatcctattgaggatgtacgtgatgttgatttgtcccagcactcacaatgatgtctctggtcacttagttaaggtgatatctgtcaggtttttctactgtaaagttactatttttccattcacaattaatgaatgtcttgggataattgcctgaatcaattattgttatgatagttgccaaatgataattttctaattccattattccttctgcatttgtttgttggcattctactgttaggaagagtctttccagctgagcacagtggcttatgcctgtaatctcagccctttgggagccagtgggaaaattgcttgggcccaggagttcaaggttacagtgagctatgatggcactactgctctccagccagtgcactcactctgcacaacagagtgagaccctgtctcttaaaaaaaaaaaaaaaaaaaggccaggtgcagtggctcatgcctgtaattccagcactttgggaggccgaggcgggcggatcacaaggtcaggagttcaagaccagcctggccagcatggtgaaaccctgtctctactaaaaatacaaaaaattagccaggcatggtggtgtgctcctgtattcccagctacttaggaagctgaggcaggagaatcacttgaacccaggaggtggaggttgcagtgagctgagattgctgccactgtactccagcctgggcgatagagcaagactctgtctcaaaaaaaaaaaaaaaaaaaaaaaaaaaaaaaggtcttcctttcctatttactcttatggatacttattttattctagtcaatggttataatcctttacaatcattatttattttagccagcccctccaagttggctcctgtgttctttgggctgtacccttaattctttgagtcttgtcttgtttgcacaagatgctctgggcttatattatatttcccccatcccagccatttctccaaggaatgtttccttttagtggagaatgatatttagaaaccaaatgctgaggctgggtgtgctcattgccattgagttatacctttaccttattgactggtttctactgttctattcagagacccctggcacaagatccctgccctggacccagagaagctcaatgtcttccggacagtacgggagatcacaggtgagtggcagagagtttgccctttctagaagaataggtgaaccactggcataaattgcggtataactacttgagaaaatcacgtcccaagttataggggaggagccaggagaacccaagaaagaagaaggctccctgcccatatgcctctctccaacccctcaggttacctgaacatccagtcctggccgccccacatgcacaacttcagtgttttttccaatttgacaaccattggaggcagaagcctctacaagtgagtaaagggtatggaggaaatggcatcttcaggcaatgaagcctgtgtcataggcattctttagtaaaatacaaggcactgtctcatacagcagtgcctcaaaaccaaagggtttcagagtttcacgaggaaaaggcaaaaggagggggattccctctcagtggatctgactagcactgagcaaatttcttgactaacatgaatcctttgaatagttaatgttcccttagtagtctctcctctcatcctgtctccttattctcagccggggcttctcattgttgatcatgaagaacttgaatgtcacatctctgggcttccgatccctgaaggaaattagtgctgggcgtatctatataagtgccaataggcagctctgctaccaccactctttgaactggaccaaggtgcttcgggggcctacggaagagcgactagacatcaagcataatcggccgcgcagagactgcggtgagggaaagggtctgctaggtggtgagaatagggagtcagggaggagagggctgaaaggactattctgccctagacgtgggagtagggttgagggatggaaccaaggagaagggggctgttaggctggaagcagtaacgaggaagaataatgaagagagggcttgctgggagtcctcagactcctctcctaacccaccccttcctttccagtggcagagggcaaagtgtgtgacccactgtgctcctctgggggatgctggggcccaggccctggtcagtgcttgtcctgtcgaaattatagccgaggaggtgtctgtgtgacccactgcaactttctgaatgggtacagtaaggggagccagtcaaggatgggtgggggtggggccctgcaatggaactgttcaggtggcatacaataaaagtctttagacagctttctgcatgtgccttggtgggattgaggtaggagacctgtggttgtgagatcggagcatgaaggtcaggacttggaagtgacccccccctccctttattccccactacagggagcctcgagaatttgcccatgaggccgaatgcttctcctgccacccggaatgccaacccatggagggcactgccacatgcaatggctcggtatactagtagcaccaggatctccaagggagacagagaaggggcaatacttggagcatctggggaatgatatggctaaggatagcacagagaggccagataatgctagggcctgcagatagaagatcctgaatgtctgggttggtctttgctgggaggtatggaattgaccttgggatctgattcttcctgaccttctctcttccactcagggctctgatacttgtgctcaatgtgcccattttcgagatgggccccactgtgtgagcagctgcccccatggagtcctaggtgccaagggcccaatctacaagtacccagatgttcagaatgaatgtcggccctgccatgagaactgcacccaggggtcagtgatgggataataaggagagggggtcaggtggaagggtaggagcacagaactagagtgagggaagcagaaagaagagagaggctgtgattcaagaatcactcccagctggccgggcgcagtggctcacacctgtaatcccagcactgtgggaggccgaggtgggtggatcacctgaggtcgggagttcgagaccagcctgaccaatatggagaaaccctgtctctaccaaaaatttaaaattagcccggcgtggtggcgcatgcctgtaatcccagctacgcgggaggctgaggcaggagaatttcttgaacccaggaggcagaggttgcggtgagctgagattgcatcattgtactccagcctgggcaacaagagtgaaactctgtctcaaaaaaaaaaaaagaatcactcccagctgtgtagcgaaggattggagaaagggaaaatcagtaacagcacaaaattacaccacagttttgggaacctggaataacctcagttcaagggagtttcacagaagaggggcttggggagagctagtgagctggaggtggaggccatgtcttgggatcagctctgggctccaggatgggatgccacggtaagttctgaaacaagcttttatatgttaggctgttgaaattgagcctctgctgtccaagctctcatttaaggtggtgactttcttccctaggtgtaaaggaccagagcttcaagactgtttaggacaaacactggtgctgatcgggtatgatggggttggagattctggaaactggggatatttgggagttgggagagaggtggttacctggagagaagagggaggctgtcttcattctggccttttatgtatgcagtccactatcactggacacttgggactcaagaatgcaggcttctggacttcccttcctaaaattaactttcagtagtctaagactggtccagatttaggttggtcccttcagtgcttaaggatatatatgtgaatgttaatttcttgccccaggtcagcatcataccttcaacacaagtatagttgacatttgtaaggaagatgcaaacccaggataatgttgggtttctatatatcccatagcaaaacccatctgacaatggctttgacagtgatagcaggattggtagtgattttcatgatgctgggcggcacttttctctactggcgtgggcgccggattcagaataaaagggctatgaggcgatacttggaacggggtgaggtgagtacttagcttacttttgttttttcttttctttttttgcatgtcctggaagtctctttatagcttaattttgagtggtaccctgtgcacccaggggtcagtgatgggataaatgtcactcccctcctctttccccagagatttgatccctttcttcaaggaagtagtgtggtcccctagaagaacactggtcagagaaatgggaggcatgcattctagtcctgattttgccattaatttgccacatgactttgaagaagttacttatcttctctgtgcctcggtttatgcatctatacagaggaaataacatttgtccttccaggatggctgtaagggtaaagggggatgatgtatgtgaaagtgctttggaaagcacagagcactgtataaaaggtactcaaggtggtaatagtactaccaactctccctagctgtccccttccccactttgtgctcctccatcaaagggaaaacccaacccctttgattcctgatctcatgagcacaaataacttcctcagttctcagggtctgtacctcaatatgcctataatccattccaggactaacggtgcttcctcttcctgccctttcagctgtgctgcttttggcattcacctatgaggagcgggttggagtgggacatgggaatggcctttcctgagtaactccttcccatttgctcctcagagcatagagcctctggaccccagtgagaaggctaacaaagtcttggccagaatcttcaaagagacagagctaaggaagcttaaagtgcttggctcgggtgtctttggaactgtgcacaaagtgagtgacccataggaattctggagaggtggggaaggcatctagggcaaaggggtgaaagatttttgcataggattgacctagggagaatgaccttatgccaactcctgccccaaacttcccagggagtgtggatccctgagggtgaatcaatcaagattccagtctgcattaaagtcattgaggacaagagtggacggcagagttttcaagctgtgacagatgtaagtgaaggaaattctgtatgccgctaggagagaggacaatattagatacaatcatgtagaagcagggtcctgtgcttctcagcagctactatgttagccagaatgttgggggtgggggggcctgggctggctgtgcacatgctgagtgtatgtgaacctgttggtttcctagataataccttttgtgtctcttagcatatgctggccattggcagcctggaccatgcccacattgtaaggctgctgggactatgcccagggtcatctctgcagcttgtcactcaatatttgcctctgggttctctgctggatcatgtgagacaacaccggggggcactggggccacagctgctgctcaactggggagtacaaattgccaaggtgagagaagcctggaggaattctgtgataagaactgcttgtctgggggccagccaggaaaaagtgagaaggttgaagttctgagaggtgaggtccccaacccccgggctgcagactggtaccagtccatggcctgttaggaaccaggccacagagcatgtgagcggcaggcaagcgagtgaagcttcatctgtatttacagtcagtccccatcacttgcattaccgcccgagttccgcctcctgtcagatcaggggcagcattagattctcttaggagcttgacttctattgtgaactgtgcatgtgaaggatctaggttgtgcactccttatgagaatctaactaatgcctgatgatctgaggtggaaaaatttcatcccaaaaccaaccctccccttcccctggaaaaactgtcttccacaaaaccagtccctggtgccaaaaaaggttggggaccactgctgagaggtaccttcaagatttgggggaattccagatctcagtgactgattcccccaaccttaagaatactttcttcccctatacctacagggaatgtactaccttgaggaacatggtatggtgcatagaaacctggctgcccgaaacgtgctactcaagtcacccagtcaggttcaggtggcagattttggtgtggctgacctgctgcctcctgatgataagcagctgctatacagtgaggccaaggtgaggagacacaaagggtaaggaggcgggggtggagtgaagcatggggatagggagcagccagtggtctcttccagaggcaagcagatgcttcatggtaagttcaaggagagaaggctgcagatgccagatattttagttcagagggcaacaaataaaataatgatcaagaacttgggactggccgggcgcggtggctcacgcctgtaatcccaacacttcgggaggccaaggcgggtggatcacaaggtcaggagatcaagaccatcctggctagcacggtgaaaccccgtctctactaaatatacaaaaaaaaaaaaaattagccaggcgtggcggcatgcatctgtactcccagctactcgggaggctgaggcaggagaatggcgtgaacccaggaggcggagcttgcagtgggccgagatcgcaccactgcactccagtctgggcgacagagcgagactccgtctcaaaaaaaaaaaaaaaagaatttgggacttggaaatcctaagaaaatttgtggaaataaacttgtgatacctctatctttaatccgcagactccaattaagtggatggcccttgagagtatccactttgggaaatacacacaccagagtgatgtctggagctatggtcagtgcatctggatgccctctctaccatcactggccccagtttcaaatttaccttttgagaccccctcttagaatctctaagcacttcagatttttgtgttagatcaggttctgccttcccttcacttcatgcccatgtctactattttgccagtgactagtccatgtcttcctgcaacaggtgtgacagtttgggagttgatgaccttcggggcagagccctatgcagggctacgattggctgaagtaccagacctgctagagaagggggagcggttggcacagccccagatctgcacaattgatgtctacatggtgatggtcaagtgtgagttacctgctgagcccaaccattttctctttttttctttttttttcttttttttttttttttgagacagagtctcacaattgtcacccaggctggagtgcaatggtgcaatcaatcttggctcactacaacctccgcctctcgggttcaagagattctcctgcttcagcctccggagtagctgggattacaggcgcccgccacacctggataactgttacacttttagtagagatggggtttcaccatgttggccaggctggtctcaaactcctgacctcaggtgatccgcctgcctcagcttcccaaagtgctgggattacaggtgtgagccatcatgctcggcctgactgcagccattttctgacttccctctgtactcctcttatggctctattccttttttttttatggagtctcgctctgttgcccatactggagtgcagtagcgtgaccttggctcaccgtgacctccacgttccaggtttaagttcttctgtctcagcctcccagatagctgggactttaggcgtgcaccaccacgcccagctaatttttttttgtctttttagtagagatggggtttcactatgttggccaggctggtctcaaagtcccgacctcaggtgatccacccgccttggcctcccaaagtgctgggattataggtgtgagccaccgcgcccggccatggaatgtattctcttttatgtctctacctcctacatcttatctccaggttggatgattgatgagaacattcgcccaacctttaaagaactagccaatgagttcaccaggatggcccgagacccaccacggtatctggtcataaaggtgagtagggagtaggaggtgctaaggaaatttagaaaaaggaggagttggctggaaccaggattccccctaacaatcacctatcgatatagagagagagtgggcctggaatagcccctgggccagagccccatggtctgacaaacaagaagctagaggaagtagagctggagccagaactagacctagacctagacttggaagcagaggaggacaacctggcaaccaccacactgggctccgccctcagcctaccagttggaacacttaatcggccacgtggggtaagacaacttctaattacccaacactttgcaccctgagccctcacaaaccctacagatacccagattaactactcaaaggcccccatggtgaatgtagatttctcccttcatcttaaccttttccttattttttcatcctagagccagagccttttaagtccatcatctggatacatgcccatgaaccagggtaatcttggggagtcttgccaggtaagttctgttgctgagaggctgggttttaggatcagattgatacgagtagtatggaagacattagaaacctctgaggtttaatcagtgtcctgcaaaaaagaaggcagtgagggccgggcgagttggctcacacctgtaatcccagcactttgggaggccagagagagtggatcacctgaggttaggagtttgagaccagcctggccaacatggtgaaaccccgtctctacccaaaatacaaaaattagctgggtgtggtggtgcacacctgtaatcacagctactcaggaggctgagacaggagaatcgcttgaacccgggaggcagaggttgcagtgagctgagattgtaccactgcactccagcctgggtgacagagcaagaccctgtctcttaaaaaaaaaaaaaaaaggccaggtgcggtggctcacgcctgtaatcctagcactttgggaggccgaggtgggcggatcatgaggtcaggagttcgagaccagcctgaccaacatggcaaaaccctgtctgtactaaaaatacaaaaactagctgcacatgatggcaggtgcctgtaatcccagctactcgggaggctgaggcaggagaatcacttgaacagggaagcagaggctgcagtgagccaagataatgccactgcactccagcctgggcgacaagaacaagactccacctcaaaaaaaaaaaaaaaaaaaaaaaaaggcagtgaacaacccaatatccttctaaacaaatctctcttctttcctcatcatgtaaatttccttgcattattttctgtttattttcttccttaggagtctgcagtttctgggagcagtgaacggtgcccccgtccagtctctctacacccaatgccacggggatgcctggcatcagagtcatcagaggggcatgtaacaggctctgaggctgagctccaggagaaagtgtcaatgtgtaggagccggagcaggagccggagcccacggccacgcggagatagcgcctaccattcccagcgccacagtctgctgactcctgttaccccactctccccacccgggttagaggaagaggatgtcaacggttatgtcatgccagatacacacctcaaaggtgcctgactcttcctagggctttcctcaatttttcctcgaattctttccccgggctcctcttttttcttctctgatcatatgcctctctgtcctattaattttttcaaactttcccctaccctcatgaagttcttcacatacctagcctttcttctcaacccccaggtactccctcctcccgggaaggcaccctttcttcagtgggtctcagttctgtcctgggtactgaagaagaagatgaagatgaggagtatgaatacatgaaccggaggagaaggcacagtccacctcatccccctaggccaagttcccttgaggagctgggttatgagtacatggatgtggggtcagacctcagtgcctctctgggcagcacacagagttgcccactccaccctgtacccatcatgcccactgcaggcacaactccagatgaagactatgaatatatgaatcggcaacgagatggaggtggtcctgggggtgattatgcagccatgggggcctgcccagcatctgagcaagggtatgaagagatgagagcttttcaggggcctggacatcaggccccccatgtccattatgcccgcctaaaaactctacgtagcttagaggctacagactctgcctttgataaccctgattactggcatagcaggcttttccccaaggctaatgcccagagaacgtaactcctgctccctgtggcactcagggagcatttaatggcagctagtgcctttagagggtaccgtcttctccctattccctctctctcccaggtcccagccccttttccccagtcccagacaattccattcaatctttggaggcttttaaacattttgacacaaaattcttatggtatgtagccagctgtgcactttcttctctttcccaaccccaggaaaggttttccttattttgtgtgctttcccagtcccattcctcagcttcttcacaggcactcctggagatatgaaggattactctccatatcccttcctctcaggctcttgactacttggaactaggctcttatgtgtgcctttgtttcccatcagactgtcaagaagaggaaagggaggaaacctagcagaggaaagtgtaattttggtttatgactcttaaccccctagaaagacagaagcttaaaatctgtgaagaaagaggttaggagtagatattgattactatcataattcagcacttaactatgagccaggcatcatactaaacttcacctacattatctcacttagtcctttatcatccttaaaacaattctgtgacatacatattatctcattttacacaaagggaagtcgggcatggtggctcatgcctgtaatctcagcactttgggaggctgaggcagaaggattacctgaggcaaggagtttgagaccagcttagccaacatagtaagacccccatctctttaaaaaaaaaaaaaaaaaaaaaaaaaaaactttagaactgggtgcagtggctcatgcctgtaatcccagccagcactttgggaggctgagatgggaagatcacttgagcccagaattagagataagcctatggaaacatagcaagacactgtctctacaggggaaaaaaaaaaaagaaactgagccttaaagagatgaaataaattaagcagtagatccaggatgcaaaatcctcccaattcctgtgcatgtgctcttattgtaaggtgccaagaaaaactgatttaagttacagcccttgtttaaggggcactgtttcttgtttttgcactgaatcaagtctaaccccaacagccacatcctcctatacctagacatctcatctcaggaagtggtggtgggggtagtcagaaggaaaaataactggacatctttgtgtaaaccataatccacatgtgccgtaaatgatcttcactccttatccgagggcaaattcacaaggatccccaagatccacttttagaagccattctcatccagcagtgagaagcttccaggtaggacagaaaaaagatccagcttcagctgcacacctctgtccccttggatggggaactaagggaaaacgtctgttgtatcactgaagttttttgttttgtttttatacgtgtctgaataaaaatgccaaagttttttttca

SEQ ID NO: 3 - DNA, 132899 bp, Homo sapiens
gctcagcaggcggggcgggagccgcgtgcgcccgaggacccggccggaaggcttgcgccagctcaggatgaggacaggctgggcgacccctcgccgcccggcggggctcctcatgctgctcttctggttcttcgatctcgcggagccctctggccgcgcaggtaaccgcgggcacgccagccccgcagtccgctgggtgcctcgacgccacagctctgctgccttccagcctggggcagggctgcgcccctggggcaggtcacggctgctttgctgttggggcgggggggctctggagccggaagagtgagtcgcaggggaggtctggcagaggaagcgccccagtgccctcgggggcccggaggagggcgcggtggatgtgggaggacagggcccttctggtgcagaggggacgcggtgcaccgtagagtaggcgcacggaggcttttttggccgggtgcgctgctccatcgtcgcctctcttatataatgttgctggagtatggggttccccatctgccctcttgcgtcccgtccctcccgttctcgcttttccttcggcccttggtcaccttggccacagggccaagaggagcctccacccacagcgccaaggattccccacgattcccggatttcactgcgcctacggtgcgcatcaggaaggaagtcaggttaaataaaccatctcctccgaaagtgaccaagaccaagagtcagctatgatgccctcacccaccgcctagagcaacaaacctttcttctcattggtttatcagctccaaatgaccccgctcccccaaggctgacagcctcacggtgaagggcaggtcgcctgcttggggacctgctgcctctcactgcggaagcaggaccagaaacagacagccttcattgatgttcagggtagtgccagccccaccacaccacaccccttggcagcaaccggttgcttttactttctctttttgcctgggcgaggggtgtgcagagaactttgtttcttggttggactgcatcatgggcactcaatgggccaccctccaccggccacttctgttatcgtgcctgtatgaggaaggaaaagattgtccaggcagtttgaaaaacattaaattgttggtggctcttattttctttgcagctaagctaagttaccatctggtttagacttccttcggagagcgatgggaagagatttctcagagtgtgaatggcatcatcctatctacagcaaggacctggaaatgaaccctgctctgagtcacacttctctattctcctttgaccctgtgtgctaggaactaccaaaagaatcctttaaaataagatcctttattgccttgataatttattctgcctgccccacaatccaaggtggaaaagttcactgcagcaactaactacagtgaaaatgcactaacttttcaatcactaacctcttggttcccatcgacatctgcttcagtcctgtttttatctccttcacaaatttcaggatttccctaattcttgcaatctctgcaatcactgccctttatcactgacccaaagcaaaaagcaccaggtttaactctgttccccctgtgctaggtccccacaggttttgttatcctgtatccttccttactcctagcagctactctgatcgattttctctcaccctcagagcagacttgtggccttgtttggggaagcactggaattttgaacccccagccatttgggtcaattgtttggcaagagtgtccgcttcatgatgctggtgatggcatgcacctcgtcacatgtgcacggctaggcttgtgcaggtggcctctattacccaaacactgaaggagcccctctgtgtccttggagagatgccaggtgcttagtttacatttttgcctgcttggagagctaacagcttgaagtaaaccaatccatcagggactcctgaggttttcaccagccaacaccacccaatcgtgcgtgaagactttctgactccctggacattgccatggactcaactgtcacttcaggacctgtttttgaactaacaaacctagacttctgattctctcttgctgcacctacctgtacattccgaacacatggtagagactctacaaaatgcttaatatgtgatctatggacggttcccctgaaattataaatgctgccatcttcatccttcttgttttcccaagctatttccctatccatttgtctgtggttataaatgtcaatatccagcttctctttggaatgtgtgaagctctttggtctagggaccaaaggcaggaattatttagtgatcagacaataagaaaacactgaaagagatgatttgcctttgatggatgtaaaaatactaaaaatttattttcaatttatggtaatgctacttagccattttctctcaaacaccactggagaatttatataacatgaagcatatacaaaatgcatctagggggtaatgaggcttctcttcatcaacttctgccttttagatttgccccaatattgtacttggaggtaaatattaaaactccattgaggactggtataaagttgtaaagtgaacaaaacccagtagaaagctattgataaagaatctattttataaaataagttttatacaataaaatctactctgtaattaccttttcaaagtatatttctaaaatagcttatatgcccttctgtaccaaattttctaaataagggattatgttcacactttctcagtcctccttccagctcttcaacctactatcccaataagggtcgtaagactgaggcagtttcaacagctcctgctaaggttaaagaaagatacggggaagcatcatgaaaggataggactctccctatctaatgtatgtttatacataccttatatatggaggctaataagtttcctttaagtatatcaataattaagatctgtactaagtgaccactataagtgtcacattgaaattgcatacttggttcaaacaagggattagtctgagaaaaacatctatattcagagatgtagcagtttgttaggaagtttggcagctccactttaacatagctactccacacctctcctgtagtgttttagtgtttcaatctcggactcctaactcctgctttttccactgtataaagaaatgtagctaatccattggattctacaaaaattttgaaaaatccagaactgcaaactgcaaaggaaggcaaagctgctgcttccccagttcacctgtttgggatccagcacacaaagcagaatgcccgggaaagacagcagcaagactacagggcaggagaggggctgtttccaacaagggtgatgggcacgtctcctgcaggagcagacttcttttttcttctgtaatttttgatactttggaatgcaagatttattttggagaggcaagagagaatactttggaaaagatgtagatcagagatctgagtagctattgaattgtgggagaaggccatgagagaaagtgtgagtagtaatcttatagcacattttccttttttgttgactgtcttcccagcctgtgtccatcaagtagaaaatggcagaggaatgtcaaagaagaaagtgtgagggatgtggctgggcacggtatctcatgcctataatcccagcattttgggaggccgaagtgggtggatcacctgaggtcaggagttcgagaccagcttggccaacatggtgaaaccccatctctactaaaaatacaaaaattacccgggtgtggtggcaggcacctgtaatctcagctacttgggaggctggggcatgagaatcacttgaacctgggaggcggaggttgcagttagctgagattgtgccactgcactccagcctgggcaacagagcaagactccatctcaaaaaaaaaagtgtgaaggatgaaagctgctatggcaaacatccttagctgcaatcctgtggaatacttttaaaattcagatttaaaataactttaagctttaaaggattgttgttgctgttgttgtttctcttgtcgttgcttctgttatttaaaacaaaacaaaaaaatccttccaaagttcaagctgcagtgagacttaattttatagttattatttacatggtaaaattcccctcaagtcaccagtccctggtatgggaatttttaactctgaaagcctttgaattattactaggaaaagcatctggtgttagtgaaaccagtgactgtgaagctggtatcaaaatgaaagtgccttttgggaaccaaaattttacaggtctttctgctgaactctggttcactgacagtgattgcttaagcttgtctaaaatatttcagctttactcttatcaacatgatttgtgctgtaattgtttaaaattttcctttgtaaaataactaaccaaattatctgattatagtttgttgtaacagatgtgaatcttattccacaaactcaggtgtgcaagaaacaatgcattactttattttcagaaatccaaattaaatttgatgctgagctcccattccaccaggttgccagaacttcaataattgtccttactggggtctttgccagctcatgcaaagtgccaggggaacattcagggaggattcttctttagtcattggatcccgctggttacctctgggttttccattgtccaaacccacaggatcttgtatctggtggctcaagactcatcagccatcactttggtagttcctggagtttggggttcagccttcttaggtgatccacactgtcaatccccccaggctttccccaggccctgtcgccttcctgagggtgccacaagccagtgtatggctggatagttgcagacgactgtgatgaaactgaggacaatgaaactgccacagtggagctggccacaggttctaccctcagaacccagacctctgtttcttcttgtttctgtaccccactgttctgctgctccctcagaaatttccccatttcctctgagatacctcaatgaatttaggtctccaaaaaatatctagggggaagtggtctttaagaaaattgtccttaagttttcctttttagtggccccactaacttgccctaaggcagaggagcacagaggcctcactatgtacttggatctgaagaaaggaacatatatatagtgcacatgctgtgttaagcatcgacttttcatgtaataatttaccctgccgtagtagctaacatgtaagcaaggcagaattatggtcccaactagacttttcattgagatgaaaactaaagagcttcttttgtcttattaaatgagaagggaaaaatctttcatgaaatagcaacaacaaatatacatgctactctacacgctttacatggattagctcctttcatgctcacaaccatcatatgaaaactggagcacagaggttaaatgatttgccctgatcctatggctaacaagtagcaggagcaaaatatggacccaggcggactggctccagagcccgtgttctgaccctacacactgcactgcctctctgctcaccactgtcccaccttttgtagtcccctgcagcttaaaaagagtgggaacagactgaggatgggaacagtccagtagtgctcagactctcctcagcaggcagggagcaaggcgcttcaaccacataatctacaatctgtctgtccatttgactcagctaatgaccccttcaccatcgtccatggaaatacgggcaagtgcatcaagccagtgtatggctggatagtagcagacgactgtgatgaaactgaggacaagttatggaagtgggtgtcccagcatcggctctttcatttgcactcccaaaagtgccttggcctcgatattaccaaatcggtaaatgagctgagaatgttcagctgtgactccagtgccatgctgtggtggaaatgtgagcaccactctctgtacggagctgcccggtaccggctggctctgaaggatggacatggcacagcaatctcaaatgcatctgatgtctggaagaaaggaggctcagaggaaagcctttgtgaccagccttatcatggtgagtattagagagggactttgaccgatttgctgttgtgcttgtcacatgtggcattaaacatgcacaatttagtaaaaatagagtcgtacattagtaagggcagtgagtaagctcttcacttccaggcactgtgcagttactttgagcgacattcttacaagtccatggtatttgcctctactttgcaggtaaggctaagagagataaagtgccttgtctgaggtcacacagccatgttgtgataaacctgggatttcatcagatagatatgtacttcttatgatggtcttctaaaccctagaggaaaggaaaccctagaggaaaggaatcattagatttgtacaggctaaaagtcaaatgatctaataatgttgatcttattctaagttttaaaagaagaagaaaggtcaggcgtagtggtgcatggttgcggtcccagcttctcgagagactgaggcagcaggatcacttgagcacacaggagttcaaggctgtagtgtgtaatgatcacgcctgtgaatagccactgcacttcagcctgggcaacatagtgagacacccatccttaaaaaagaaaagaaggagaaggaggaaaaatatattttttcttgcctacggattttgaataaaatgggaaaattttgagtggattttcttatttattttcatttttgcatggcaaccaaattttgatgtttatatttatgattcagcattttaagagtggagtttttcagttgcttccgaaaataagtatattaatattgccttgcggggagcggaccatggacttagccctgagtctagggactggattgcaactaatttctaagttaaagaatgagtagatttatttttttaaccattaaatgtaattagctatctcccaagcaaatatttttcattatgttgctctaaattacaccaaatgtcgatatgcatataattatgtcctctaagtcctattatttccccttgcctttctttacaaatttccctagctttacagtggctttcttcttctcttaaagatcatttaagctaaatttggcctcaaagtcactatagcagcttgctcccatactttccattatccatctgcacaagtttttctttctagctttctatttcctagtgaggatgcaagaattattctgagaatgtcaagttctgttgtggagaaatattagagaattagagatagggtttccttttcatcattccctggcctttgaatagttgacagtctgtttctgcgagccagtttcctcctaaaagtaaagcagttgctttttggatatgacttaatggcaaatttaaattctgtgccacaaaagcccttctccaacttgccaactaagaggaaacacagagccaaacaaaatgccttttaattggatttaacttgtttcattgtatttgtccagggatcagaaaggataattttcttggcagggttcttttagtctcctgatctaattcttttgaggggcatagttgtaatcttaaactccctcagtccccagtgtcttcatttcaatataactggttttcctttttatcctatgtattttatgtatgcatttctaatgttcttctgagacagggactgtggatttcacccagctgccaaagagatcagtagcacaaaaaaggttaaggatctacccaggggaccacccagagagagctaagcaatgccaccagcataacccaaaggcatgaagtgtttcttgaccttttcaaatataatatttgaaacactaaagctttttttaaagcatatatagttgtgactagtcaaggcatacctcaagttttaatttgcacagaaaccagggccaaacttgccacctcttctctgtttctgtctgggtgactggtaccatctaagttctacatgtcagaaatcagcaagtcacctgagaggtttcaggctcgcctcttccaccactccaatataatcaaatatgaagtcctggcaattctacccttttcaatttatgtatatcccttcttgttcttaggttagggactgctgtcttaagttagggactttctctaggactccgctctcagactctcgatactgattgttgtccccaccttcttatctagcagtatataaacaaaacatacaagatacccaagtcccaacaaagtgaaatccaaggttacctggtttgttacagcaaagctagggcttaaaaccagtattccattccccaaacatagcttctttctttcccccttggctttagcagtataaaccaagttttcacttgtgatacaagaacattaatttatcactgtgccttgggttgcctctcaccccaactcctatcctgtgtgagtcgtgttcatctcagagaaaactgaagttgtataaattttatgagtgaactgcttttgactagcacccaggtgtacattaatatcattaagataccttgatctcactagcacttttcaaattttgaatgtttggtgaatcacgcagaggaaatggactttttgtggcagggtggctgcagaactatcagaattctgggcaactcttagaagcctgccaacaacctctttatccattgaaactattttgtctcatgttactgatgacattaatttgctagttttctgcataatcacctcatctcacaaatttgtaactattgcataataaagctgttgttttaaggatgctatcatcataaatttgcacattcagagaagattcttcccaggaaagtctgtcttgctaaggaagcccatggtgtgtaagaggccagcatcagcaaagaatgtgtgggaacaaaatgcttagtgaatagttagcgtaatttagctgcttctggtgtggtggttgtatgcttatcattcttcaaagcatatattgtgacttagagagcttattaattgaagcccagctttgagctatgaaatttaacttgaaacttgagaaggcacccgctgatgtcacaagttgtccttataggtcaagagtctaatcagagagagcccattctcattcctgtcacttgcagctgagtgcctgaatgtatcacttgactactctgcaaaaatggggatttcccagacaagtataatacctcccctatgatctcacaggtttatgataaagaacaaatgacagaaatgtataccaaggcactttgtattccaaaaatcaaaggttttagaaaagaaaactgatggctctacaaggaacagtctttgtgttcagggactgtcctcttaggtttgtaatatgggaaaagaaactggtcatgagctattggggggttttgatgcggttaaactgaaacataggtaataagcagaatccttataaaatataaggtcaacacactctttaacagaagtacgcttttgaaaactgtttctatgacacagcaaaacaaaaccagtgatctttaaaagactatttgccaagaaaagcatccagattattattaccttttgctataggtctgcttattacattctaagctgttaaatggcctcacactttagttagacggacactggaggaaaagaaagtagaatcaaatactgtcttaagcacacttttaagcaaatctgtgagacatttggaggaaccctaattgcctggtaaacggtgataagatctgattactatgatttacctaatggccattatttgatctgttaatgactgaggtttttagcaaattgtggaccgaggttttggcaaattgtgacagggatacagggatagctgttctataaaaacacctttccaagagaattagtattgatataagtatcaaacattctttccagcatttccaggcatatttgaggttggaatcacttttcagttcctccccatgtaccagggaaaatgattgaagtaaaagctatgtctactacctcactggccccccgccggtcacatgactgccccattgaagctgctgcttctttcacaccccaaattaccatgccttgtaccttcccaagaatctgctcagaaattcagcagctcttccttttacttcctcaaaaaccacagtctcaattctacctccagtctctgaacaatgggactatttgtccatctttctaatgccgcaggtggttccaaagtccacacccaccctcagtggttccaaggaatttttctggctccaacactttctaaagaaaagaaaatagaggtaaatgtaacctcagccagggcaccctttctggtgaagtgctctgcggcccacagcagagttagtagaccctcacctgatcaagccaggctctttcagcgcctcatcacaccacagtaagtgaagcttcacatggttgatcactgaacgctatccccagtttgcaaaagcagaaacagaggctactagaggttggatagctagcccacaggcaaacagtgggttagcagggagccagcattcatatccagacctgacagcacccatgctctgaattcctacactcggatattgtattctaaacaacgtttcttttaaaaacagttttagaaattagccacctgacgctgactacccagtttttaactctcttttccccaacttcctctccaacccagagatctataccagagatgggaactcttatgggagaccttgtgaatttccattcttaattgatgggacctggcatcatgattgcattcttgatgaagatcatagtgggccatggtgtgccaccaccttaaattatgaatatgaccgaaagtggggcatctgcttaaagcctggtatgtatgggctggtaaattttatgtggaaaggtagtacatttatatgaggcaatagggagaaggaagagttcaaagtgactcaaaagtgactgcaaaaatattatcccggataagaagtgtatgtttggaggagaagagagaggtaatgtgtagccatgaatttgccttcagaagcaggcccggaagtgaaccaaggcggatggtgtcatggaggaggaggagggagtgttccatagcaccccagggagaggaagtgtggaaaaggcatgcacaattaggaaattgctgctgacctttagtagtttcagaagactagagggggtagaagctggattgtagtggaatgaagcatgaacagaaggaagtaagcctcgtaagtttcacggagcagaagaagagacagttggcaaaggacaaaattgcaacaaatttatgtagttacaatcttatttggctttattgcaattctagaatcaggcaacacctcatttcataaaatagactactgtaagtgttccagttcgttgaacagaggggattggctttgtagacagaaaaagggctgaagaaagcaaaaacagaaaccgaagagtggattggtcatttcaacgtaactttccttgtaagagcaatagagaaataattgattggtcaacatcaggtgacttcaggttaagcattgaaacagagggaacttcattatcagtccaattaaagattgaaactggcctgttggggaaattaggcagttgtctctctctcctgatttctcaaaagaccagatgacaatctgtttcagtttggtgatgtggaactttggcatgggtgactccattttgatttttgagtcctagatcaggagcttagtccaaaacagtggcttttttttatttaaaaaagcaaagggtagtttaagaaagagatcagttgaaaaacacttttagaatggtgaaatcttaagtatgtttatggcctgaagcaaagagcgggaaagagaagagatagatcttcctggctcaaaattggtgacactgttccttccaccattcctgtgtgtttgtcagagtgctttttctcgttactttttaccagaagcaaactgttcaggatttgctaaagaatttgctgttctttagaaagacagagagagaccaaagtagcaatcacatcattatctggcacataactgagacacagtttctcaccaattaggtgagagttacaggggatcacggtacctgacatgtgataggtactcacaaaatattacttaatggacaataggttgaaagaatctatagcaaagagaaaggaaagagctccagacctaagtaataatagttaatacttaacagggctctgccaggtgtcagatactgtttcaggctctcaatatacattaactcattcagtcctcacagcaaccctgaaaggtaccatactttatccccattttacagatgatcacagtgaggcacaagggagatatgtaacttgcctaagatcacacagctaataaatatcagaactagaattcaaacccaggaagtctggctatgaagtccttgtcccaaacagctacactaggctgactcattgagtagctagccaggtggtattagtaatgctgatccctccttcgggaatgtgagcttcagaatgcagaagctcttggagagcttggagagattatactgggttaagacttaagatttcagggtgcaacagaatcacatggagagtttgttagaacacagatatctagggcccagagattctgattcagtagatttttggtgggccccccaaatttggcaagtttccaggtagtgctgataatgctggtctgggaaccacacttggaggattacatatctaattagaggcccaggcttctcaacacctgtaacctacctactaaaatagaaaaagccagtattttcttcagctataattgataataagcagagtttggtcagccaggtatcaacttcatttaactctccttatcatttggatcagaaatttagatgtgaaagtttgcttagaggtaatccaatgtaaacccctgtttctcaggtgagaggcagaaggcccagatcagtgaaatgacctgtcagggtcagaccacatttttgtggacactagtgaaggattctttatcctccttccccactgtacatatttacccccactgtaccttgctgccttgacaggaatgtatcttggtgcctttagcctcctgtgggtgttgtgtgtgtgctggggctttgggggtgtgacacatacagtggtgttaatgcatgcatatgcttcctagagttactttttatggaagaagcaagagaaagtttctcaaacctgagggctgctaaatcatggaggtcatgttgtatagcaaacacactgccatcccactcctggaagcttctggatttacaagtgtagggcctcagtggtaataatgaacctttagacaatgtgctttcaaatccaccctattttgtttttatcaaatgtcagaatctctgttgctatttatgctatagaaaaatggctgaagcagcaggatgtgccatcagaggatcaacaagaccagtgccctcattatagctctgtcacagtcacctctaggtctttgttcctgtctgttaaataaggacattagacaagatgatctctaaaggcccttccagcttataggatcatgagtataacatctgatatgtaactggctataggaggccttttggaaagtcccccagttggagcctgggatgcacttgacacagcctgcattggacttcccctcttgtggggagtacacaggaggctctgaatatattttgaaccagttgttttgaaatttttatttctcattcaggaaacagcttgcagtttctttgtctgaaattatgcatactctacaaacacatatgtatatatgtttctatgcacatatatacacacaaatacatatataatgcatatgtaatgtgaattacatatcatatattctttattaaagtattaaggagaaatttggacatagtttcccaaataaggtagtcacttgggctcaatatcttggccatttaagcagcatgtctgtgcacacacataaacatacagtggtttttatgcaggctgtgggcaaaccctctgtcatctgccactatgttcaaatgagcttgttttccattagctcagtgttcacaacatgtgcacactgagacccatatctcaggcagagggcagtcagggacatgggcgaaaacacagcattgtaattgatagggataaaaggagaatggaaaataagaaagagtggaagcttcaaccagcctgagtcatttggtgtgtcatgattccaattttattgtgatcaaaatatggtctaaatgagtgatggcagtctccctttgggcatatcctaagagtatgcaaattgacttgcagtatttctaagcattctaagtaatagaaaacattatgtccttactttatgatcactaacgtgtctttatcaacagaaaacggttgtgaagataattgggaaaagaacgagcagtttggaagttgctaccaatttaatactcagacggctctttcttggaaagaagcttatgtttcatgtcagaatcaaggagctgatttactgagcatcaacagtgctgctgaattaacttaccttaaaggtagattttatttgcatgtgatagagcaaattggctaaaattgtaaaggtacttcttcttctgttttcatatccagatgtgtttctttgtatgtaacttttctgacctctcttgggatttaaacttctacactgaaacccataagcaaaaaagtactgaatgtaatcatatttcaccattgagaaatgtatcttgtgatggaaactaaagagagattgatgttcagaaaacaaggttgggtagcaagattaaactgctaccctaatcctaaatgaaaggattttcaaaaagcgaataattaaactctttgaacattgaaaaatagagaattaaaggaagggaaggaagatggttaagttacactagatggcctcagtaaacatccttacattgagtgaaagggtacagtcctcaggggcaaggagtgttttactaaatcttaaagtggatttaataacatggacacagaatgggtaggactttgttttgttttgtttgggggatggtagtggtaattttttaatttttaattatgaaaacttaatagataagaataaataaaaactttaaaagaccatttatcctatcataagaatttaagtatcaccttgttaatttcaataacaaaccctattggaactttgattggaattgtattgaatcatagattcattaaagaggaattggccaggtgcggtggctcacacctgcaatgccagcactttaaaaggtaaaggcaggaggattacttgaagccaggggtttgaaaccagcctgggcaaagtgagaccacgtctctacaaaaaaaaaaatttttttttaattggctgttggcatgtgcctgtagtcccagctgctctggagactgaggtagaaggattgcttgagcctgggagattgaagctgcagagagctatgatggcatcactgcactccagcctgagtgatagaggaagaccttgtcttaaaaaataaataaataaaaggtattgcagtttcaatattgtcttctcaaccatgaaaatgatatgcttttctatttatttaggacttcttttatgtactcagtaaaattctataactctttccatagtcttgtatatctttcaaaagaaactatataaacaaattttaatattatatttaaaaatcaaggaacctaagttactgagtccctgatgagttattctttgaatgaaagacaaataattgtaatatatgataatgatgatgtgccagacagactactaaatgctttttatacattatctcctttcatcccatctaactaccttatgaggtggacgttattgttatcctcattttgcagatgaggaatgcgaggctcagagaggaaacataacttgtccaaagtcacccacaagtatttagcagagcctaaatttgaagagtcagtttgacttgaaaacaaattgtatcacacatataaatggattcaccttttataagactgtaagttctttgcaggcagaaatgggtctcatgggttgtttttcacttttgcacaaagctgtaagctttattgctatatattaagcaaacatgtattgtctaagtaattcagatgcattctgtcacactattttataataactggaaatatttgataaatgcttactgtaagcaagccctactttctccagataaatccattaatcattactacaacctcatcaaacaaatgttttatcactagataaggaaattgatccttagaaataatatacccaacagcatacagctaagaagtatcagattgggatttgaatatcaacatatagaattgcagaactctatttatgtgaaagagggtctcaatatgttgcccaggctagtgtgcagtggatattcacaggtgtgatcagagcacactatagcctcaactcttgggctcaagcgatcttcccacctcagtcttccaagtagctaggactacaggagcacaggatcatgcccagcttttttgttatactacgtacccctcttagatatctttatctctttttatcattaaaaggccacaggtcttttgtcgctctttttgtttacagctttattcagacctcctttcttacttgtagctttacccttttcctgtattgtttggcacttgaatattcagatctttagaatgaaaatctgccaaataagccaaatgagctagtgtttggcattggagttctattccagacctcactgaagcctcagaaaaaatattgttgcgaatgaaaagtgccgataaattcaagtttcctagaatattgacatttggaaaccgatgacttcagtgaaggagaaaagtgccaaagtgtgacaatcaaatgttgcacgattctttatgcatcagttttctttaataactcatgaaagtaatgtaatatggtaaaggaccttattgtaccctactcctggccggacatgccccgtatttaatacatatcattaattttagaagtatatctgtttctaatgtttcaagttcctcttccagtgtgaaagcttcttaggcatatcaatacgcctaattatgactattggtttcccaagacccaagaaaactgtgttttaacctctaaaactctgctttctatctttctttcttttttcttttttttttttttttttgttgttgttgagacagagtcctgctctgccacctaggatggagtgcagtggcacaatatcggctcactgcaacctctgtctcctgggttcaagcaattcttctgcctcagcctcctgagtagctgggattacaggcacacgccaccacacctggctaatttttgtatttttagtagagacagggtttcaccgtgttggccaggctggtctcaaactcttgacttcaggtgatccacccgccttctatctttcttaattgctgatagcatctggtcatcaaataacaaatttgaatgatctatctccactgtaccacgtgtgtgtgtgtgtgtgtgtgtgtgtgtgtgtgtgtgtgactctcactctcattctgtatctctagtctaaacaggaccctttgggccctagagccataagccacatatatatatgttatattatatataatatatatatatattccattgtctatgaaacagctcctatacatatttctgacccagtcccagaaaaacttgatcatatggggatccatgtctgtctccttctactagattgaaattctcatgagggcaaggactttgtcatttcagtttttacatccctagaacctggcaaataatatgtgtgcctaatgaatttaaattgtcagtctagaatacagtcagatcttctgaatctagaagtacaatggaaactgcttttgataagtcttctatattaataaaagaggattaaaaatagatagtgagacagctactctaagaagcttctgtccttaccttagatgaaagggaatttgacaagctaataggagagcagaactgaattaacttatcagcctttgggtttctcaatagtctgaagatttttgtctattagcattgcctacctttgatgcataaacagccctctacagggattgctgccttacaatcaaggtctgcagatttgtttgttattagtagaataagtctaatttagataataacttaggcaactttgtcactttttaaaaattttttaattcttacagaaaaagaaggcattgctaagattttctggattggtttaaatcagctatactctgctagaggctgggaatggtcagaccacaaaccattaaactttctcaactgggatccaggtaactgctctttccctaccccctctgcacagaacaaatcttcaaaaaagcaaaagcttctcactcaccaatagcttagaaaagtttcacatcttggcagctcttactatggttacctctcagaagaattttttcttcctaaaccattcttaattgtggtactgttattgccaagctgaaccacaccatggacaactgagcatttgaacctctagacctttagaacaaccctacatttttatgtaagagcaaaatgagctccaccacatggcccaggagccattctatgtccctaaaggacttggcatgtctataactcacccatgctgtgtttcatctgcagctgaactctaatatggaattatccgctcgttttcaaactcttggggtctctccccactatagcacccaagtactgacaatataatggttgtattttataatacaaataaatacctcaaagaaagtcttttagggaataaaacaagcaaaatgccacttagccaaaaagcattcttcccaaaggaaggattagacaactttgaaaaataaaatcttaggcttatgacaaatgtagaacctaaagttaacactaatttcagtataaagctgcctgcacacatagtaggaaaactgagttaagagcaataaaattcaaattagccactttagttaatttagtttgctaaatttccttaccagcaaatgaagtaatacttttattatttcagtaaatagaatatttaaagataatttaatctttaactcaaggccttaatggcatgacaatgataaattaatatttttattttatggagtagcagattaagagctactaagcatagaatatggcctggaagtcatttgaggaaaaagtttggtttttgtttttaaaattaactacaacatatcatgatgttttccctttagattctatattttagaagaaagacatatttaagcacataattattcattgaggcttatacgtttcaatttagttaagttttaactataatatgagttcccataaaagcataaaattaggaatacaaattattctttctgacaccatcctggccctaactttctcattctaatgctttgaaaaatgttcccttttaagacaggcccagtgcacctactataggtggctccagctgtgcaagaatggatgctgagtctggtctgtggcagagcttttcctgtgaagctcaactgccctatgtctgcaggaaaccattaaataatacagtggagttaacaggtatctttctcacatactcatacaaatagacaaataggtcttaaaatcatagttttgtgaaaacaagtaaatcttttccaacatccgtttccacctttccttctcctgatactgacagtacagaaaagtacttgatttttaaccctgtggttagatattatcaaccatatatgaataaagctttatttgaggtaatgaagaatattaaatataaatatgtatgcgcccagaagaaggcagagatattcgagataggaaatatacttctgttcgtgtgtggctcttttttctccagagcagtggttctccaggggtggtccccagaccaacagcatcagcatcacctcttcctgttagaaatgcaagctctcaggacccaccccagatttgctacatcagaaactacaggatggggtccagcaatctgtattttaagaaactttccaggtggttctgatgcgtattcaagtctgagaaccactgcagttcatgcctccgtaatgaggcaaaacctatagacacaggagtaagcccaggcttctctaccttgtgccccacagcacccagccctcttctatccttctctgtcaggcaagtctttgcattgaaaaatcaagtaaaaaaggagaggtgcagagggacaaaatgtgtacaataagggggtttttccagggtgtttggggatgaaagtgacacaagaacagctgaagtttttgaggagtggaagggtgtgaggagtttttgaaagaatggagaagaggagtgtattgactgtcaagcacagggcctgatgtatacctggtatttaattacatcctcaccaaatgagagaaactaatactcaaagctggagggatgtattcatccgttttcatgctactgataaagacatacccaagactgggaagaaaaagaggtttaatggaccttacaatctcacgtggctggggaggtctcacaatcatggccgaaggcaaggaggagcaagtcacatcttacatgaatggtggcaggcaaagaaagagagcttgtgaaggaaaactccgccttataaaaccgccagatctcatgagacttattcgctatcacgagaacagcagggagagacctgcccccatgattcaattacctttcaccaggtccctcccataacacatgggaatttaaggtgagatttgggtgaggacacagccaaaccatatcaaggggaaaggatgatttttaaatgtcctgctttaaggaactgtgagtgaagggaataaagcattcaaatgtcttgtcatctaaaaaggagtatagagcaatttttaaggaaaaactagatataaaataaagaatctgaggggatattttaagataataggggaaatgaacatttgtcttccaagttgattcaaaccaaatttagtccatacaacaaaaggcataatagaaaagccagcacaaatgaaaataaactagagcaattgatgatagattaagtaaataccttgcagtagcaattattaaataaatcatgatgtttccacatgattgaataatatgcatttactaaaataactgtgccagcaggaaaatacaaagaacaaaaccaaatgatatgcctacttatcattttaatcttgtaaaaatatgtattcattgagacaaagactagaatatgaaaatgattgcattaagttccattatgggtgatatttttcctctgttcctttatcataattataaaatataacaataatacatgctatttcagaatattaaagttaattgagttatctcgcaagtgtaagaggctagctgaatctgaatcactttatcctttagtaaaaaaaacaaactgtccacatttttttttctttttttttttaattatactttaagttttagggtacatgtgcacattgtgcaggttagttacatatgtatacgtgtgccatgctggtgcgctgcacccactaactcgtcatctagcattaggtatatctcccaatgctatccctcccccctccccctccccccaccccacaacagtccccagagatgctgtgttttcttacaacaaatattccaaatggttctaaatcagtgaagtctgagtaaccaactcactttctggttttgttaacggggatagaagtattctgtggggtttcatacttcattctttttttctaatctggaaagattagaccttcgattgtgagctttctcatggtcaaaacagaatcactaattccatgaggaccatctgtctagcagaggggaggaaagaagtccaggggtaacctttgccctctcatctcttggatgcgaagtgtataaatgtcttattctgtcccttaaatctctgcctgtcctttgttcaacggtgagcgttaatctacatccccttgctaagctggccatacaagaaaaggaggcttgccctcttataatcttctcaaggacagagactggagggaaacctaacaaattccatatccaggaaaaaatttgtcagaaaatgacttaaggcacatctttctactgtctacttggactaagggcaatctcccttgactgtgtccaagcccttaatagtctgtgctcagccatatagcacattgaagcatgttaaagtcacatcattttctgaatcccagcgggaattcctatgatgctatatatacctcatttatgtggtaggcaccacatgaattcatgtcaccgtagcatctgacatcacgtccccagttttccaggactctcattattcaagaaaaaagaatttgcaatgttattgattcacaatagatgtatctttactggaatataaatagctgcttttcccccagatgtctggacatactcagatacccgctgtgatgcaggctggctgccaaataatggattttgctatctgctggtaaatgaaagtaattcctgggataaggcacatgcgaaatgcaaagccttcagtagtgacctaatcagcattcattctctagcagatgtggaggtggttgtcacaaaactccataatgagggtaagtttttaaaaataccctatttgagaggcttaagccattttaaagtatccctggttttagactctttgtgggaatgaaaagcttacagtttgatcccacagatcagccctgtcagataggattgtctctggtgatggaactgttctacaattggtctagtatggtggtcactagcaacatgcagcttctgagcagttggcatgtagccagggcaactgaggaactgaattattacttttatttcatcttaattaatttaagtggccgcatgtgcctagtggcaaccaatttgacagtactgccattgattgatttccctcttctcatgagctaaattctatttaagttgctcaaaaaacttaagtgataattacttcacttttgtaattatttgaaagctaaagactggtaaaggaaaatatactagacggacagtattatgatctcttcctagaatagaactcttagctagaatagctaagagtaggtacctactcagtgccagcctggtgctccttgtttcacttgtgaaggcagcagagtcataccagggcagcagtggacagtatttctattcaaattgggatatgtatgattgtatttatagaatttcattcaccccacaaagcaaagtttatctacaccagatatcaggaacacccagcctgcagatgttctacctgtgtactttacttgcataagttacttgaaaagccttcattacccaacctgcctgtcgtatcaacatattaataaccgaattaagaatactacaaaggctcttaaaactccatatcagaatataaaaatttgtataacaatgtacatattacagtatttaattgagcaaaaccaaacaaataatacatttttcttttagatatcaaagaagaagtgtggataggccttaagaacataaacataccaactttatttcagtggtcagatggtactgaagttactctaacatattgggatgagaatgagccaaatgttccctacaataagacgcccaactgtgtttcctacttaggagaggtacgaaacctcctgtggtttctttatattcttcctgttttacctaatgataatattaagacttctttggttgggaagtttgcgtataagctggaaaataaaaggtaagagcactctggatcagggtacagagccacggaccattacctgttaagaattgggccgcacagcaggaggtgagcggcgggtaagcaagcattactgcctgaactccgcctcctgtcagattggcagcagcattagattctcctaggagggtgaaccctattatgaactgcacatgcaagggatctaggttgcacttccttgtggaacagtttcatcccaaaactatcctcttccccaccctctgtggaaaaaattgtcttccacaaaactggtccctggtgtcaaaggttggcaacaaataatctaaagtctagactgtctttctggtagctactttaaaaaggtaaataaaagcaattactaaataagcaacccatatcctatctgagagcatcttttctggtctcaaacagatacagagaatccctttagaactcacattcttgtgctgactgattctagcaacctgctttctctcaggaccagggcctgcacccacctttctgccatcagtgtgatattcggcagatagccacaatttaacctgaaaaatcccatcttccaaattcatgttcagattgttttatatcgatactactttgagaagtaaaaaaatggttttatttaaaaactaggcctaacatttttcagaaaccaccttactcctatagaatgcttaaacattttttgaacatcttttacttaataatccaaaataggctgtgtcttgagcagaaaagatatatgtacctctacgttttgtttgtatcactttcctgtggacccctaattggttatgaaagtgactgtgtcactcagacatctaaagagacttaagtggaagcaataaatattatgtgtatttaaaagaagtttagaaaggtgtcacatttgatgctctatttaaaaggacatccaacatgtctttagaagaacatcagaaatggaaaagtgttcccatgggcaagagtgaattgatggcatacctagacagcattccaatgttcaaaactgacccttatcacaatcgacttattagaatttaattcaaacaaagcaaagtgacgtagtcaattaagcaaattaatgttaagtagcatatatgaaagagagaattttgaagtccagattgaagtagagttgaaagaaacttttgacctagaattcatggagaatagctattttagccaccatcatcattttacacgtgaggaaaccgagaaagggaggttgatgatgtacctaaaagtttcaaactttggctatgccattctagtctagaagactagaatgctggaactgtgggctgagttcttctctcttcaacttttatactaagtgtgctttgatggttttattgctactcttataagaaaatgaaatttatccacactgtgacctggaggtgatgctgaggtaactggctgtgagccatcactttgcaggcctgttgagtagcattttctaggagtgtgttctcacatttgataattcacttatattcatttctctctctctgtctctgtcatagtttttgtgagttcagttctgaatatgcggtaaataatttcctttccaagcaaatgtttttgtctcctttcaaagctaggtcagtggaaagtccaatcatgtgaggagaaactaaaatatgtatgcaagagaaagggagaaaaactgaatgacgcaagttctgataagatgtgtcctccagatgaggtaggtaaaatccctatgtaaattttctcaagcagtattacaacttcttggttagaaatggtagctgagacttaaataactcagacttataaaatagaggaaactactagcttctgttcatttaagttagaacaagccagaaggcagtgagtcatagcatattggccttcttacagaagcagaaacttgaaaatttctataaatatttgtagaattactatcctcaaggctgatgtctttacttcccccactaatatcaatattcaaaaataattcatccagtgaatattatactcttatgatgagccagccacccatatgagaagtaacccatactttttgtctgacacaggcccacagtcttgtggaggttatctgtgaaattgcatcccaccctcatcacatgtatgatttcaatagccatgtcctcaatttccacaagttctaagacgttatcaatgtagcagaaacatgcttgccagacgggacaccatcaagtctggaaaagagtttgacaatatttttcctctgacttagggctggaagagacatggagaaacctgttacaagatttatgaggatgaggtcccttttggaacaaactgcaatctgactatcactagcaggtgtgaccatcagtaaacttgtactcataaactttcaactctgaattcttttgccaaacagtcttcctaagtaaaaggtgcatcttcaaatagagtcaatcattgtgaaacacttgccaatttgattctccttttgtagatttgagcaagaatacctaaatgatttgatgaaaaagtatgataaatctctaagaaaatacttctggactggcctgagagatgtagattcttgtggagagtataactgggcaactgttggtggaagaaggcgggctgtaaccttttccaactggaattttcttgagccaggtgagtgtcttaatctttgaagtagtagtatactgtgactagtgaaaggcagcactcctcccaaagatgttcctcacttacttttgaaatgtgagggacatgatgatcttcaggattggagtctatctatggaaccataaatagaagcagtggctatgtcttccctattatgtccttgggaataatccaatgaaagaaattcaaaaacttagttctcccaaaccaccatctaatggctcagagctagaagcaccagtgtgagtttttaaaatcttttccatgtaaatctcaaatagaatctagaagctcccgtgtgaggctctttacattttcatctctctgcttcttaacctattttcaaaactgaatgtgttttcttccattattctcaatgggtaagaattatggaggctatcttgtattatttattttgtttttgtttttgtttttgttttgagatggggtctcactctgttgcccaggctggaatgcagtggtgtgatctcggctcactgcaacctctgcctcccaggttcaagtgattcttctgcctcagcctcccaagtagctgggattacaggtgcatgccaacatgcccagctactttttgtatttctgtagagatggggttttaacatgttggccaggctggtctcgatctcctgaccccaagtaatccatctgcctcagcctcccaaagtgctgggattacaggtgtgagccactgtgcctggcttcttatttattttgaaagttatttcctctttctccaaccagcctaaagcattgaccataatttgccatagaatcagaacacttaagccggaaaggacctcagaaatacttttagagttaagaaaacagagactttaaaaggtgatttacttgacaaagatcatctggttattgaattaatgaaatccagagttcctgatttttaagccagtggctttgaataagacagcagtataaagcattctacttttcaccctgtgaattatttatattttattgtgttggtctaatgtgatcatgaagactattttttataacacagagattggaaaatatgagcttacaattgaacatgttatttgaaatagaaaatgcccacaaaagttaggacacatggtcatcaccatcaacatgagtgatgttgctagtaacaaagtcatccttttatgtctgaaaaagatagagtatacagatgttgatcctggttaaatctcagattaagaacactctaatggataaagcacatagatttctttttttctttttcttttttctttttttttttttttttttttttttgagatggagtttcgctcctcttgcccaggctggagtgcaatggctcgatctcggctcactgtaacctctgcctcccgtgtacaaacaattctcctgcctcagcctcccaagtagctgggattacaggcacctgccaccatgcccagctaattttttttgtatttttagtagagacggagtttcaccattttggccaggctggtctcgaactcctgacctcaggtgatctacccacctcagcctccgaaagtgctgggattacaggcgtgagccaccgtgcctggccagatttgttttatagacactaagagtaaaggtgacgttcttgataactaagtcttggtggttggagaggtgcttgggaagtagctaccatgactacttcctccattctatgaccagaaaggctatgtgaagctctctttaccattattgcacccatcctcagccaacttggtctatcatgggcacaccgtggatagaaggactgaacagggaaaaatagcacacccattcagggtagcaaggcaattatttttcccagtttcttattcctcttgctgtttgtgtatatgagactatgtggcttctctgtttggtgggatagaagttgtcctattacttttcagtatatgtaactcttcttgtcttttacctgcttcaggcagtgtgatgtaatggaaaatggaacatgatgttttgtcagacaaatctggtttcaaccccaactctaccattcactaactctgactgtgggcaagttacttagtcttcatttacaaaatggaactgataattcaaactaccttttaatactgttatgaatacataaaattatgactgtcataaaattaacggtaaacaaatgtatgttaccacatacctccttctacctttattgtaccagcttttcctttggatcagaatctgggagagttgtgttttgaggttaactaagtttcttaaaaactgctcaaagtttttaagctaatttgaaccactatcctaagcagcagtagtatttagggtacagctctagaaacagaccacctgggcacaaatcctggggcaaccacttactaattctatgaccttgaacaagtcacttcattctcactgtacctcaaattatgacaatagaatccccccataggtttgttatgaggattaatctttttcaaaaagtactttacaaataataaacacctgtcattattattctgaacaacatatttctttcctctctttgttccattttttttttattctctctccccaacttggctgaagtaaagagtagaaacactagaaaatgtttgaactttaacgttttaatttttaattgagctttccacttcaatcccagcttccccgggcggctgcgtggctatgtctactggaaagtctgttggaaagtgggaggtgaaggactgcagaagcttcaaagcactttcaatttgcaagaaaatgagtggaccccttgggcctgaagaagcatcccctaagcctgatgacccctgtcctgaaggctggcagagtttccccgcaagtctttcttgttataaggtaaagtgacattctcattctatccttcaatgaagttatttttccactacccttgttcatgtccttgtacaaattatgctcttctccatagtactatgtaacctaactaaagtgctctggagcacagagtccttggcagggcatcgctgaacctctggtgtgaggtgcctcagccccacaccctgcacgtgtcctacctgaaagggcaggcccaaagccagaagtggctccaccccaaggtctttttttcccagtaagttggtgtactatatgccatactgccactatgcctatgatcctcatattcctctaattcttgttgtcaaattaacagctccagcactcctaataatgtaaaaaaagtgtatatatatttacacttttacaaacatatatatatttgtgtgtatatatacaaatatatatatttatatatacaatatatatatttataaacatatttacaatatatatattataaatatatttataaatatatttacaatatatatatttataaatatatttataaaatatatatgtttatatatttacaaaatatatatgtatatatatttacaaaatatatatatatttacatatatttacaaaatatatatatttacataaatttacaaaatatatatatttacatatatttacaaaatatatatatttacatatatttacaaaatatatatatttacatatatttacaaaatatatatatttacatatatttacaaaatatatatatttacatatatttacaaaatatatatatatttacaaaatatatatatttacatatatttactatatatatatttacaaaatatatatatttatatatatttacaaaatatgtacatatttatatagatttacaaaatatgtacatatttatatagatttacaaaatatgtacatatttatatagatttacaaaatatgtacatatttatatagatttacaaaatatgtatatatttatatagatttacaaaatatgtatatatttatatagatttacaaaatatgtatatatttatatagatttacaaaatatgtatatatttatatagatttacaaaatatgtatatatttatatagatttacaaaacatatatatatttatatatttacaaaacatatatttacaatatatttatatatatttacaatatatatatttacaatatatatatttacaatatatttatatatatttactatatatatttacaatatatttatatatatttacaatatatatacgtttatatatatttacaaaatatatatacgtttatatatttacaaaatatatatacgtttatatatttacaaaatatatacgtttatatatttttacaaaatatatacgtttatatgtatttttacaaaatatatacgtttatatgtatttttacaaaatatatacgtttatatgtatttttacaaaatatatacgtttatatgtatttttacaaaatatatacgtttatatgtatttttacaaaatatatacgtttatatgtatttttacaaaatatatacgtttatatgtatttttacaaaatatatacgtttatatgtatttttacaaaatatatacgtttatatgtatttttactatatgtatatatttatgtatatttttacaaaatgtatatatttatgtatatttttacaaaatgtatatatttatgtgtatttttattatatgtatatatatttatatatatatttggtctgcatcagtcagctagttccataaacaaaccactagatgccatcccaaaattcggtggctatgacaacaaacatttagcctcacattctcacagatcttcaggccagctagagtttgactgatctagtttgggcttgaatggtgacctctgctcccaacttcaggtcagctgtgctgggctccagcccttccttctagagctcaggctaaaagggcaacagctcacaggggtttgttgttctcatggtatatcactggagcccaagaaggcaagccaaccatataagcacatttcaggcctctgctcagtttaccttcactaatatcccatcaacacagtaagtcatatggccaagccccatgccaaggtacaaagacgtatactccgcccaccagggggctgtggcaagaccatctaattatattacaaggaactgaagaattgggacaaatataattcatcctgtcattgtgtcatcatctcttcttcctcctctgcctcctcctcctcctctttttcttctttcttctttcttctttcttcttctttctttttctcctttcttcttcttttgaaacagcccaagttccaggtttacttttgccactttctgtcaatattcacacaccagtgcagactgctctttggttgttcctcgtcagaaaatagtgctatttttgtgtgggtcactgtgtcttatattcgaaatttctattgttagcacatttctttgccaaaggctactcccaaagcatttatatgtatcctttacagccttgcctcctggttcattttatctttcaaggtcctaggaatacaggagaacgtggatcttgttggaatagttccccagcctggctgaggaaggccatccatctgaccacaaggactggcatctgtgctggcctttagttgaattgacactttcagcaggacctgtctgtgtctcagtatatgtgcatttacctatgccttcactacacctttaagaattcatttcaggggcccacacatgtgacagtaattgactttagcactatgaaatactttatgataataccataaaacaaattaatattatattttgctaaggtattccatgcagaaagaattgtaagaaagaggaactgggaagaagctgaacgattctgccaagcccttggagcacacctttctagcttcagccatgtggatgaaataaaggaatttcttcactttttaacggaccagttcaggtaatactttaagaatgagaatttctatgctgaatttgatgtcctctagatattcaaaattgacatgttcttaccctcactctctgttggaaaaaaaatggacatgttttattatctaaaaggtcatttggtgcttagcagtcatggaacattaagcactcttaatgtgcagacactatgaggaatctaaaaatgaatgagatgtattccctaccctttgtttaataaagtccaacagcaatgtatggcagaaaatctagaatataggcaaggaagggccttgggaattcagaggagggagggagtgtttctgggagtataatcaggaaaaatgtcataaagaaggctgattcttggaaggtaggtattatttcaaaaggcaagataggagaaggagaaggagccagaaaaaaaacagaacataagcaaaggaactaagaccagaatatacagatatggtcaaggagaaatgagtcatacaaattagctagaaaatggaatttggatatgaaattggaatgtccttgtttgcaagggaaggagtttgatcttaagtaattaaacacaaccaaacaaaaaacaaaaacaaggtgcgtgtgtgtgtatttatatctacacacactcacatatacctgcatatatacatatatacacagagaggaaggggttggccaggctggtctcgaacttctgacctcaggtgatctgcccacctcagcctcccaaagtactgggattacaggcattagccaccacacccagcccattatcagttttgattaagtgtgagtctgcaaatttgttcaataataataaagtccaattctgcacttttgaaagagacttaaaacaaagcttgccaattagtacttatccagctctaagactataatgttcttttcctgggaggaaggggccacaaaatactacaaaattgtgaaattctaataaaaatccttaaaaatttaaaaattttttaaattttttaattttaaaaattaaagcaactagcaacattttcattgtgcaacagataaaagttagtgctgagtagctggtggcctcctgaaatggggcctgactctccaatttgccaggtctctaatttattacttcttgaccccacttcacttgcttatgttatgtgcttgtcttatatttactcaaatagcaattgagttaataatcacaagtcatgtgatcatcttaataggtactgaaaatgcattgggtaaaatccactattcattcctggtttaatacataaatatacacttatatttagtaaatataactaatatgtaaattcttatttgaatagaagaatagctcaaattaatagccatatcacacttaatgatgaagcattgttaagtgcatttccctgaaagtcagaaaaaggtaagtatccctatatcatcactattgttaatcttggtttgaaattcaactcctgcacattaagataaaaacaatactataatgtgtaaatgtttatatatattaagcagaggaaaagacagattatcaaagagtaaaaaatatactatttacatttaaaactagactgcaaaaagggtaatggctattatatctctaggaagtaagattttgagtgatttttaaagtcttttctatgggctgggtgtggtggcttatgcctgtaatcccagcactttgggggcctgaggtgagaggattgcttgaaaccaggagttcgagaccagcctgggtagcatagggagaccctatctctatttaaaaaaaaaaaaaaaagaattagctgggcatggtggcacacacctgtagtcctggttactcaggaggctgagtcaggaggatcacttgagcccaggagttcaaggatacagtgagacaagatagtgccactgcactccagcttgggcaacagagtgagatgctgtctgtaaaaaataaatgaatagaatgttttctttgaaaatttctatattttccagatttgctttttgttttgttttttgagacagtcttgttttgtcactcaggctgaggtacagtggcatgattacagctcactgcagcctcaacctcccagactcaggtaatccccccacttcagcctcccaagtagctgggactacaatcacatgccaccacacccagctaatgtttgtatttttttgtagaaacgggtttttccatgttgcccaggctaatctcagattcctggctcaagcgattcaccttccttggcctcccaaggtgctgggatcacagatgtgagccacagtgcctggcccagatttgctctaatatagcttctgctgtgtttttctcattagagaatgtagtttcactacagtgtactgggaatctaatgcaaaatatgatacctgtgttccataaatatttatttattaagcatctatcgtagaatctcaggtattctagacatcattgtccagtgttagaaattaatatacaaaatttcactgcagactgacccaaggcaatttgtatatactaaatactaactcttgggttctttgtgaggtgagtgttagctattccctcaaccttgagaatagattataacaaatgcaaaattcagaccaaaattttccacacatacagacatttgctatgcaaacattcattgaagcagacacaaaacattttatacaacgtgttttgtaagcttgacaacattccagcaatctgtcctttttggtgttttaactatcaccttgcacagatttacttgaagcagatgtggcagtgttctgtggcagcattctgttcccattgtagtgagtatcaggccatcacaatcacctgacccaatgactggatgtggggttgtttcgaatcaagccctactaagatacaggctgcggcctcgcaagattctaatacactcttgagaagtgtgagagtttctctaaatattttagctaatccctgcatctcaaataacttatatttcaccagtgagagcccaatcctaccatcatgctgatgaacaagcttccgatttcactgacattaacccagttctcacattcattctgctcatgaccaaagcctccagtgtgactttggtgatcatggaagtcctcatggtggccacctctggaccatggcctttctttttcttttttttttttattattatactttaagttctagggtacatgtgcacaacatgctggtttgttacgtatgtatacatgtgccatgttggtttgctgcacccattagctcgtcatttacattaggtatttctcctaatgctatccctcccccatcactctgccccacaacaggtcccggtgtgtgatgttccccgccctgtgtccaagtgttctcattgttcaattcccacctgtgagtgagaacatgcggtgtttggttttctgtccttgcgatagtttgctcagaatgatggtttccagcttcatccgtgtccctacaaaggacatgaactcatccttttttatggctgcatagtattccatggtgtatatgtgtggggcatggcctttcaaatacaccaccaatacttcctgacatgtaagtttcaagcagggcaacttaatggcccttagatttcaagcttgacacacacaatatcatattatccagataaagtatttttaagtaaaatgctgacataagctctagattccaagcaagaggttagtaactctaactggaacgaggagccatggataagtactaatgaatgaggttgtagatatttgtgagaaacaataagtagaaaacattggaatatcatatgtgatagaaatgaccattaagagcatccatatacagaacgaattacactaggaaacaaaacatgaaaggaaatttttatgatttgtttctttgttttgaatcacacttgttgagcactcccttctttaaaaaattaatacaagttcattatataaaatttggaaaatataaaaatgagtaatgaagcaaacaatcacctcaaatcctagctcctgattataaacatagtaaacccttagtgtaaaccctttctgtttacttacatctctacacatttagcttttacaaaacctattttccatagaatgtactatgtttaatttttttctaatcataaaagtaatgcacattgaatttagaaaacagaacagcacagagaaaaaacaaatctccttaatcccttcacttataggaactgtattttatttgtactctgatcctagcagttaacacaatgccatggtaagcagactgctttgtttgcttaataacttctccataataaagaaattgtttgcctgtgctgtgcttagagaacatattctaaaaccaaaattgtaaccatggcttaaaggaaagaaggaagcaaacccatttatattagaaaatgattctaaagcatactccttgaatgccttggctttttattgcaggaattgacctttctcagcaagatatccattgcccaaattgtgtattgcatgccaaggagttaagtcagattactgctgtacctctcacaatctaagttccacatctctatttgtatttcagtgaaaaggattcatggtgcaccaaatcattaaggctctgagatctttgcaactcttaatggcagcccaacagggacagccactgtagggcaaaaatagccataggattagagaagaaagccttgtttgcaatgccattgctgctgtgtacactaccccctgtgatgtggcaagaatggatttagacataaatctaaggctttgtagaataagcaccctcatcaaatagtatttattggggcttatggctgagatactgttttccttagcaaccaaatgcagcaggaaatttgattgagaataggaattttaacacaattacacatattaaccttttacgctatctcttcttaacccaatagttttaaaaccatatacttagtgcttggagtaccaggaacttataaagagagagagggaatctcagtttgacttgattccccagttatgatcaggtgcaattttttccttcacattttctaaaatcaacattggaagtgtgcaatgatcaatgtgatatccaatttcttcttccctttatctgcctacagctaaactaggccaaaccaggaatgagttacaattgaggaaatattttccacttctgatcccgcacaaaaaaaatacatacatgtcgctattattttctgtatttatgacatgctagtgagttctttaaaatgaagctgaaatctgtaaatttctgtgttcaaatgaaacttttttcaatctgtaaatttctgtgttcaaatgaaacatttctgaaatacagtttcagaaagtagtggagattagaaattttggacaatcgagcaaactcttttctgtaggaagctgtcctctgaggtgcagcaaaggagccagaaatgggcttgaaagcagagatgtttctaagtggaaggaaggggagctattagctgagagaagactgggtaagggcttgaggagcctagaaagttgaggatgaacctctaaaaaggctaccagtgggagcctctacaatgcaggtgacaaatgatctttgatcgtcttcctggttgtattgtggattgtgtaaagaagataaaatagctaatgcttactttagggaaacacaaaattctacacgaattccccaggcccaaatatataatgtgcaaagatttgggagaaatgcagttatttccccaagtaaatatgaggaagaaaacttaactgcctctctattttagccgtctggctttaattgtgctgtgtatgccaattgtctagaccctgtggtttagaaatccagcactcgggcagtatgatacactcggaagcctgtaagagagctccgatgagctgaaggcataaactgcaaattcctcttgtagctactaaatttaaactggatttaattgtctccactggatatatcttaggtccacaaattggtggatctgtctctatgaaagaaaacaagataacaataaaaaccaaaacaggacagtcctcattcatattccattgcattaagtccaaaagccttgaggttgaaaagatgaaaaagtacttattgttgttaaaatatgagggaatgttgaacaaaggtaagaaataaagaaaagcaattatttattaaaaaataagaaatcagtttaaaattctttgtttcagcctttgattcactagtacattttattaaaatgcacttatatttctctgtagacttgtagctatatgttccatatattctgctgaacttgagagtatgcattgtttttagatttggaatctaccccttctctaaaatgtatctgtattacacttacaggcatattacatttatatatatgtatacacacatatgtactgatcatacataccatgtaccaacaaaaggttaaattatgtggaatattattggtcgcctaaaagtgtaataaattttagaaaacattttcaaatggagttagaggcagagaaaattttctgtgcttatattacatctacttatgctggatatttatccctggccagagcataaatgtatttgaggggaaaggattacttagacatatgttcctgcctccatattgcttgtgtagatagtcttccttggaaggcctacccttcttcctcttggccaatctgaatactggcattcagatcatgactagaaagaaatgttagccatcccttgaagaatatcttttgtcctaccaacctcacaaagtctttcttcattttctgcagtccgcagtgacctctcctttctctgaacttttgtgtcacctaaaatgtatataactcatttgatagctttcataaatggtctttacttttttgttcatatatatcttatctctctatttcatattacatttcagggtagatgtaggtcttatacttctctgtgtcatcattgcacctagctcaatgccttttacataaaagtataatacttataggtgataagtataatcacttaaattattgcttaatttatttttctggtatatttctttggcacataggcaatactcaaatgcttgtttaaacttagtggatagtaggaactcaactatgtttcaaatattgtttaacaaaaatttagccaaatagttctgcattttaaagaagaatatttgatagtgttatagacaaacactttaaagaaatgccattgttgcctttgactgtatctgaaagtattgtttaatattcaagcactacagtaaaagtcttggaataatttccatttttttcctcttaaaattcaaagtagaatggtttttgcctttcatatgaagaaaacagcttaatatgtagttttaaaagtatggtactttttctgtaactaccccacattaagggcttagtttcatttcaaaagacttctttatgttgcttgaaactgtgcttttcaattagtgatgcacattagacatgtgagtgctaaatatttttgccaagcattgtcctgtatttttaacacttgctttttacatagtggccagcattggctgtggattggtttgaataaaaggagcccagatttacaaggatcctggcaatggagtgatcgtacaccagtaagttaaaacgttattgttttaggtagtatggaaacactgtttgtttcaataacaagttgattgttaaataatacattgacacctaaaatttatatggaaccacaaaagaccctgaatagccaaagaaatcttgagcaaaaagaataaagctggaggccatcacactacctgagcttgaagatacacctcaaagctatagtaaccaaaacagcatggtactggcataaaaacagacacttagaccaacggaacagaatagagaggccaaaaatacatccatatatttatagccaactggttttcaacaaagataccaagagcacacaatgagaaaaggacagtctcttctataaatgatagtaggaaaactggatttccacatgcagaaaaatgagattaaacccttatctcataccatatacaaaaatcaactccaaatgaattaaagccctaaatggtaggccccaaactatgaaactactaggagaaaacacagggggaaagctccatgacattggtctggacaaggatttttttggatacgaactcaaaaacacagacaacaaaaaccaaaatagacaaatgggattacatcagactaaaaagcttctgcacaataaaggaaacaatcaacagagtgaagagacaacccacagaataagagaaaatatttgcaaattatcatctgattaaaggttaatatccaaaatacagtcgtacatcacttaacaatgggatacattttgagaaatgcattgttagttaggcagtgtttttgtgcaaacatcatagaacatacttaaacaaatctagatggtacagcctacttcacacataggctacacatctaggctttatattgctcctaggctacaaacctgttgaacatgttactgtactgactactatagggatttgtaacacaatgataacatagaaaaggtacagtaaagatataatctcgtgggaacacatcttcaagggatggctaacatttctttctagccatgatctgaatgccagtattcacactggccaagaggaggaaggataggccttccaaggaagactatctacacaagcatatggaggcaggaacatacatgtaggccatctgtggttgactgaaaggccattatgcaatgcatgactgtagataaggaactcaaacaactcaatagcaagaaaacaatctgattttaaaatggccaaatgactgaatagacatttctcaaaagaagacatacagatggccaacagtcataggaaaaaatgctcaacatcactaatcatcagggaaatgcacattaaaaccatagtaagttatcacctcccacctctcagaatgattattataaaaaagacaaaagatacatgttggtaaggatgtggagaagagggagcttttgcacactgttggtgggaatgtaaattagtacaaccattattgaaaacactatgaaggtccctcaaaaaattaaaaatagaactaaccacatgaacagcaatcccactactgggcatatattcagaggaagtgaaatgagaatgtttaagatactcggagggtgactgcagcactattcatggtagccaagataggaaatcaacctaagtgtccatcaacagatgaatggatgaagcaagtatggtacatgtacacaatggagtactactcagccataaaagggaaggaaatcctgccgtttgtgacaacatgggtgaccctggaggacattatgttaaatgaaagaagccaggcacagaaagacaaatgccacgtgatatcactgagatgtggaatttaaaaaaaaaaaaaaaggatctcatagagctaaagaatagaatggtggtttccaagagctggggcagatgaggtgggggactggggagatgttggtcaaaggatacaaaatttcatttagataggaagaataagttcaagagatctattgtacaacaagttggttatagttaatattttatattcttgaaaaatgctaaaagtagatgttaagtgttctcaccacagaaataactgtgtgagataatgcatttgttaattagctaaatttagtcagtccacaatgtatatatacttcaaaacatcatgttgtatatgataaatgcatatacttttatctgccaatttaaaaaataaaataaatacattcacgtatcatacaaccattaaaattatgtgtctttattgaaatgaaaatagagtctcatataggcagtaaggaaaagacaagttacaagtcttctttttatttttaaaaacccatatgtatagtctctctatatatagtcaaaaaattgtaaagctataaatatagtagtcatctttgggtagtatgagtgatttttttctttttgaaatggggtcttactctgccacccagggtgaagtgcagtgctgcgatctcaactcactacaaccttcacctcccaggctcaagcgatcttcccacctagcctccccagtagctgagaccacagatgcatgccatcacgcccggctaattttttttttttttttttgagacgtagtctcactctgtcgcccaggctagagtgcagtcgtgcaatctctgctcactgcaagctccgcctcccgggttcacaccattctcctgcctcagcctcctgagtggctgggacttcaggcatgtgccaccacgcccaactaattttttagtagagatggggtttcaccatattggccagggtgatctctaactcctgaccctgtgatccacccgcctcagcctcccaaagtgctgggattacaggtgtgagctaccgtgcccttccacgcccagctaattcttatatttttttgtagagatagggtttcaccatgttgcccaggctggtctcaaactcctgagctcaggcagtctacccatcttagcctcccaaagtgttggaattacaggtgtgagccacatctggccacaagtgattgttttcaaagctttctctttatactgtttattttcatttttatagtaagaagcttttctttttattatctaaatatggaagagttatacaaaaaataaaatatctttttctggggggactaggtggggatgacagagtctcactgtgtcacccaggctagaatacagtggtgccagtatgactcactgcagcctcaacctcctgggttcaattgatcctcatgtctcagcctctcaagtacaggcacatgccaccacatccagctaatttttgtattttttgtagagatggggtttcaccatgttgcccaggctggtctcgaattcctgggctcaagccatctgccaaccttggcctcccaaagtgctgggattaccagcatgagtcactgtgcctggccaaaagtatccttattggaggaaattatttgtttggagaaacctctagaaaatccttgctattattccacatttatattataaggatatattagtgtaatagttataggagcaaaattattctcagatattcaatatttactccaatttttgtcaccaaaaattggtgactccaatgtcacctccttttttattctttctaaatgtaaaactccttgagtttattttcaaattggagcatatctgagattagttaatcaaataatgagcatttcaacacatgcaaaaaaagaaaaaagtattttgcaaacctgattctctatgactccagcggcgaacttaatacactattaacttccacttctgaaactgtggcttcctttgtttggaaacttatgacattatgacatttgctaagtcctctcatgatttagcatcatgatataaaaaagagatggaaaagttttctttctgtggcatatcaacgcacttgagtgattaaggctgcctaaattacatctaaattgcaaatatttatacatcagtcttaaattctcaagcctctcttgtcttttcaggtgtctactattatcatgccaaatgagtttcagcaggattatgacatcagagactgtgctgctgtcaaggtcagtacaatgctggaaaatctgcatatttaaaacataagtccatcatcatatgcagtcaagtaacagatccatggagtgtctttttatgtgaagcatgatgttagatgcagtgagagataagcacacccatggcctggccctcagcagcctaacttacacttcatttgagaggataaaattcatattcaagaaaacctctctcattaccacgcagtaatatgctccaaatgagggggctgaggaaggctaatgaaattcagaggagaaagtgagtcccatggccatttcccaggaagaggtgggacttgaactgggactttaaggatggatagagtttctacaaatgggatagggtaaggttttttcatgaggggatggtatgagaaagtggtataaaataaggtggaagtggaagagggcagtggagaacagaatacagatcaagaagtttcattggtgctgtccttgataacagtattaggaaatcagattgatgccactttaaggaatttctacacttcttgataggcaacagggcattttttaaagtttctgagtagggagggtcacatgaactaaggagggtatgaggaagattcatcttgagacagatgtcaaaagcaacaggtaagattggaaggcatagaagaccagtgaggcatcttcctttgcagaatgcattcatgtatccatttcataaacagtccaaggagtcagtgaggcactgggtgatagaacaatgacaaggtacaaagcatagccattgtcttcacaaaactaaagtctagtaggaaataaagacaagtaaacaagcaattacaacaccactgagtaaagactatgacatgcgaaatacaagttttatgcaagaacaagaatattatgaaagaataataaggatggtgatggtgatggtccatggtggtggtgatgatgatgatggagcagctaacactgattaactcctttatgagccagccactatactaggcatgtcacatatgtcacatagcacataagcaatcttgtgaggtaggcactgttactgtattcatctcacatggaaatttgagctgtgagtaatttaccccagcttacatggagtaaatttaaactgaaagaactgaaatttacacccatgtgtgtctgggtctggtactcttaaccactatgctatatgactaggcatttatagaaatagaaagggtattgatttatgagaaaattgtatgttttagttcagatattttgaatccaagctagctataagatgtatgctatggtaagttgagatcaagagtcttgagttgaaaggaaaatgtatatttttaaaaaaagggccaagaagtggatttggaggaactgccaatatatagagtgaaaaaagatgaagatggaggagacatcagttaatatctttgatttgtagtccaagaaagagattcaacaaggtggctgaccagaaatgttacaggaaggctgagggatataagaactgacaaaaccacaggaaagcactgttttcaaagtaactcttctagtaataaactgtgtagtacatgtcatttttatagaattcccaatgtaacacaggaaaaggtgaaaacttcagagaagcttatggaatttttagtagtgttgagaacactggtacaataaactgtgttctagggaaatagagttgccaagtatggagagatttgaaaatctaccaaataaataaagagatactaatgcaacctgcatcaggaacaagcccagccagggcagtgttctgtaaggaaaatcttacctcacctgccacagaacccccagaaacttggtcttaagagaaaatagtctaagaagtgatggatgtctctcccaagtaatgccttcccctatcctttttatcctacttgctgactggaatttgtaatgagccatcctggaccatgtggagaagggcaaaatcctagaaatggcatggtaacaccagagaaggagcctgagccactgaggctggacctttatgtcgctttctgatctaatttgatcacagcttggtgcttggatacctctgaaataaatattctaacaaaaattgtcaggtgtgggggagaaaatttgcattttggacataaacatgactttacaacatatttcctttgttagcccctttgagggctcttgctcagggtattactgtttaaatattccattaattcatgtgttcatttatcgaacaaatatcttaggtgctagagctaaaatagagatcaaagtcatagggcttacagtttagtgttccataagggatgtatcaacttcaaaatattctgcaatacttttcctcttataggtatttcataggccatggcgaagaggctggcatttctatgatgatagagaatttatttatttgaggccttttgcttgtgatacaaaacttgaatgggtgtgccaaattccaaaaggtaagtggtagttattccttttcacaaccttctcatgttaacattgtgaatgcctagctcaaagtagctaggggagcattttgatctataattctgatgtctaaaagcctatgatgatgatgcaattaatatgtggagcaccccctgcctgactccggcttctaatagaaggctagcttattgaaatttagtgatatcttactctttgatcatggaagaatttgcatagaagataaaatgtgaggctcattcagggagattagattttggatgaaatattattttaagcaaaaggagaaatgcagaatcattttcgtttttattttgatgcaaaatgaaaaaataaagataatcttgggaagaataaggcagaagtcaagaaataaaaatttggcaggtccctgtaaaatttagaagcaattttcaatgaactataaaactgctaatactttatataaattcaaatttgagaagccagttagattgatagtatagcctttgataacagaagggagagtggggagaaatgtagataccattttactttactttttccaggaaaacatgaaatattaagaaaaatgttaagactttaattctcaaattattattattattttttaagacagtcttgctcagtcttccaggctggagtgcagtagcacaatcttggctcactgcagcctctgcctcccaggttcaagtgattctcctgcctcagccactggcgtagctgggactacaggcacccactaccgcacctagccaatttttgtattttcagtagagtcagggtttcaccatgttggccaagctggtctcgaactcctgacctcaggtgattggcccgcctcagcctcccaaagtgctagaattacaggcatgagccactgcacccagcctcaaattatttttaagcagagattggctgtatgaaattaattagcagaaaacccatagaaggtttttaaagaaatctctgaactgaatgtaaacagatcattgaaactaaaggtatatcctcctacaagttctcaaagaacccaaagttcacatcatggaactgcctattagaagattgttattcctaaaatagttaaaagagcttcagatgtgacatcaggtagtagcaaatctctttcacaaaggcaaactgtcaaaccagttgtaagggaaagacagttgtgttgatgggtttttctaaaggataaattatgcctaagttattcttgattattttattaaacccaaaaaagggacaaaggaaaaccagtttggatatcctttaaacaagtggaaaagtaacttgtatataattaattcggacaatgtctctgttttgaagtgttaatgtgagcctcccattactctctggcatttgttagcattccacagacagtgtcattgttccaaccaaagtgccctcgatgggagctgctgcccccacctcctgtttgagcagtggagcagaccccagagtttaaacaagggcaaccttagaaatggcaaattagccaccagaggaaatagtatgaagggcatgtggaggtgtatatatattttttttaatatatattttttaacaagagagaaaggaattaacccacttaaaaatataaatcaattaatcgaacaaatctaaataattccacctccattatccccatgcagaaataaaataaaaaactaaactcctgttctcagcctgtcccaatcacttgaagaaatcaatgattgcttgctccagggtttaaatgttatgttcacccttttttgaccgtactgtacctaactttctaagttacgatgtgatgcattcagctggttggatattttcttggttattagagcagcctaagtttactcaacttgtattcatctgtattttctggttttcttaaagaagttttcctcttatgtattctaaatcaccatgcctcttctctggctcttgcctttttattacttggttctaattaatcctctcttccctaaaagagatattttgacaacctgtaaatttgaagttacctcaaccacagtggatatttgtactttttaaatattattttttgagaaaactgtgtcaaaaataaggctcataaaagtgtttttaggaaaattacctatgatgccattacccagacatagcaatttttattgtatttcttgataccttgtacacacatacatgtttgcaatcttgtataaaaaacaccttgcatcctacttttctcactaatttaaagatatttaaaggttagccatagctttccctcccccacacacaaataatcagaagtctttgacaagattacagacaagaaactatgtacattttgaactgacttgcaacattattgttggaaattatccaatacgaatagaactggctcagagagagactaaagatgctggctattcaggcagtcctctgagtcaggtcttctgatgcctgcctgaggctcacatgccacaccaaaattaagaccagctattttactctgtaatttctaagattaagcaaatgatgtctttgacttgaagccagtgtgatctgtggccagaatgaaaagggggaggaacgcaaataggctcccatggggaacttccctgtgcctggtcctgtgctggccacttcctccagggcatcacacgtgaccttcactctctgtgagtcaggtagccatctagttttcatagaggagaaaatcaaggctcagagagggttaagccactcatccgaaataccatggcagcaaaatgcataagggcatttgcacactgacccgcccagcttccaacccggaattctgtgtagcatgccattatttactccgtttccatctgggaatcctgagtcacttttaattattttcctctcagttttgtctcatcttctcaaaaggttcaacactggagcattgtacattgtttccaaggatatcttggaagacaatgaactctatcaacctaagtttacagaacagttaacctgtttcattagatgcagaagtggttcctgaataacttcccttttcaatgaccgttattttggttcctacttcttatgcttctgtgtaacacatacaatatcattatttacttgtttttactttctaattcttagctatattttatctgtcttacttcttttgtgacctctgtgacacaaggtaaaagactgctagaaatacttcattaatatttaacgtatctgccttttggatttctcctgaagcaggtttagcatcggccctacaaaatacaactaaagtgatcaaaacgtgaagtgggttggccagaaatggacaagactcaacaatactgcaagtcctttcgagctacattaaaggccgtacttatagtataccctgatctgtcatggaatactaatgccacttgctttcttcctcatacaggccgtactccaaaaacaccagactggtacaatccaggtgagttaagaaaactgaaatttaaccaaagctgcttttaccttgtcactaatgcatttagttaattatttaagtgccagcttcttctctatacatcttcaagtgagacaaaatttctccaggcaaggaaggtgagcgactggtatgggatgaggtgatgagggtgactttttccttccctgtgagtgtaggggagtggcagagtcactggctcaggaatctcttgttccttgtagtcagtactgccccagccagagagggccggtaatctgaattactatttatagttttgaacattaactcatgcttagaggacacagtttgctttgcatagtcataattctaatctttttcttcttcttctttagaccgtgctggaattcatggacctccacttataattgaaggaagtgaatattggtttgttgctgatcttcacctaaactatgaagaagccgtcctgtactgtgccagcaatcacagctttcttgcaactataacatcttttgtgggactaaaagccatcaaaaacaaaatagcaaatgtaatttaaaagaatatattttaaatatatttcttatttttgtatttattccatttaaaaatattacaaaaattttgccaaaatctacaaaagttaaatttttctttaatgtaaaatctgcctcacagcatccaaatttgtttcatgttagaaaaattaagtagaattgcttatgttttaaaatatacaagattaataataaatgtcactttataaggtaaacatcagtagataatatagatcattctaatttcctgtcacattttttactaaaagtcaactttatagttaacttgagtttctgtttctactaataagtaactttgcaaaataatttttgggaagaaaaataatttctgtatttttaaatttataatcaattgcaataggatactgtatgcccacttaaagtattagtctaattaatatatgcccataattacagctaccatatttcctgtacccacaataggatctgtaaatatactgagaaatttcaactactctttggcaaaaggttctagtttgtataattttgaaatctaagtaaggaatgtctggaaattttagtggttagtgattatagtaagacaatgtattcgaatcaaaaccctcaagaaagctcagcacatataaggatggatgtttggcttgtttttcagatatctggtgatggacagaagtggtggataagaattagcgagtggccaatagatgatcattttacatagtaggtgacatcattgattctacctttgtaaagttatcacttaaaagaagcagttccttttactaaatggatttctatttataagtagtttgaatattaatccataaactgcctaaattagagaaaccaagcccttttgcatgttagcatcaagaaaaaaggggtatagagtaatggtattaacattaaatttagaaataaaataacttacagtaaaaagaaaaaaatggaacacctaattacattacgagttgtcaaatctgtcattttcttttagctcacgatatccatggcaccgctttcctgtgacatttggagaggaatgcttgtacatgtctgccaagacttggcttatcggtaaagttaattctaaatcctttaatgctgattatgtaatatgtgaagttcaggttcagtttctagcttaatcttgttttccttttaattatatgtttggtaatttcatcttattctgatttattattagcaacaatagctcaaattcccaatgcaaataaaggtacttttcactgtgaatattttaacttcctttatcctaaagcagttacttagtaataaacttaccactttcctaactgataagtgtctaagcaaattttcaaagataagcaggcagcagttctaaaatatagtttaagtcccctccccctgattacattgccccttcaactctcttcctacctcctgccttcaccctgggatggtatggtagtcacacaaaatgtgtgctgtttcatagacagtattggtatgctgtaacctactgataaaaataatcatagaagacagaaatggctagagaagaaagggaatatattttaagcatttaggaaagattgatttcaagagcctttctttactactgggttgcttttaaaatgtgctgacttggccgggcacggtggctcatgcctgtaatcccagcactttgggaggctgaggcaggcaaatcacttgaggcaaggagttcgagaccagcctggccaacgtggtgaatccctgtctctactaaaaatacaaaaattagccaggtgtggcagcatgcacctgcaatcccagcttcttgggaggctgaagtatgagaatcacttgaatctgggaggtggaggatgcagtaagccaacattgcaccactgcactccagccccgggcaacagagcgagactctgtctcaaaaaaaaaaaaacaaaaaaaaacacacaaaacaaaataaaaatgtactgactgaaaaattctcaccatagtaatcctggcttttcatttctcagacttaggtaaaccaacagactgtagtaccaagttgcccttcatctgtgaaaaatataatgtttcttcgttagagaaatacagcccagattctgcagctaaagtgcaatgttctgagcaatggattccttttcagaataaggtaaaaagagaattgctacattatgcaacaatgattgcttccatgctggttttatagcctatggcagaatggcaacccattagtgacaacatcactgaaatagactctgcatgtttcaggatcccacctggccctctgtgttgccagaaaccgtggatgatatcaagaattaactctcaagttggtcatgcctacaggtcttttaaagtgcagcatttctattttgttgctactaacacttaaattgcttaagttgatctgttgagggattgggatgcattgaatagtcaggactgtctctatggccttataggaaactgacttaatttctggcttgtgttttctttttcccctcaaggagagcatccaagcagcatctgccaatcaaattagaccagcatttcacaaactactttttggggactacacacatgctacaaaatgttaatcattgatcttgcctccaaatgggggttttatgattaaataggtttgagaaatgctgcattctgtatctgcctctttgagatgcataatccatgttggtatatgtatgtattaggaaatgcatttggcttctgaaaagaggttgctacagtatgagaaaagatttattctgtcacattaaagacatttgaagataagcaggtttgtgtggaaacaccatgaagtcttcaaaatcaggcttcttttggttttgctctgccatccttaatataaggcttccgagcttaaattcagggtgttctctctagggtcttttctagaagttacccgatgagtttgtccacattgggtagcttggctcattggccactccagtctataagaaagctgaaaaaaaaattttttttgtaagatatttcaaggaacacaatttgggacataccactctacactaaagtgatcataatgtgaaaaagggaaaaaagagatgtgtctgacagctgaaagcatctgtagtaaagctaggggtacattttaactttttaaaattaggacaatctttttaattcctcaaggtaatagtactgtgttaatttgcatagctgatataaatttgaattaaaatatcctgccaagaaagagatgaatttttcaacagtgtttcttgacataaggagatgatgattaaggacacagattttgaaattaggtggaacagagtacagatactgaccttactattgtgtggctatttcacttatggatgaagttatttaatgtccctgtgcctcagtttctgtctccattgtgagaattaaatgagataatactacacaaactgcttaacacataggaagcactcaataaatgagagatctttaaatatataaagatataatataaaatatatattaaagatataatatacaatatatatcttatatataagatataatatatatatatatatatatatatatgaaagtttgaagaccgctcttcagttgtttcaattgagaaggtagcttgagcctggaagctcaaggttacagtgagctatgattgcaccactgcactccggcctgtgcaacagagagagactctgtctcttaaaaaattaaataattaatgagagcataaacttgaattcttatggtactacattgcaaattaccatatctcacagaccgaaaattagcagccctctaaaagatgaagcattttacttcctatgtgagcgttcctgtgtctggaatctcatgcttcacatatgtctttgtttgcagtgttttctaaagatcaaacccgtgtctctcacattttctcaagcaagcgatacctgtcactcctatggtggcacccttccttcagtgttgagccagattgaacaaggtactggaattatttgggaaacatgttttattctgatctggggccaggttagttttaggaggctatggggaattaacatacaaaaattcttattaaacttcttttgttatggaacagataaaagactatgttgatagataaacaaaatatattcattgacatttttaatgtatctttaatttgaataaatcaaatgctttttaaaaatctctttctaacagactttattacatccttgcttccggatatggaagctactttatggattggtttgcgctggactgcctatgaaaagataaacaaatggacagataacagagagctgacgtacagtaactttcacccattattggttagtgggaggctgagaataccagaaaatgtaagtttttttaaaaaccaatactcttcatacctctgtgaaatacttgagtctttcatacatttttggactaagcaaaaccccactgtattattccatttgtatgaaatgtccagaataggcacatctaagatagtaagtaggttagtgattgctagaggctacgggggatggaaggattgagaatagtgcctaaagagtatggagtttcttttggggatggcgaaaatgttctaagatttatggggtgatggttgtgtaactctgtgaatatactaaaaactattgaatatgtactttaaatgagcgaattgtctcatatatgaattatagctcagtaaagctgttgcaagaacaacaggtgcctccccagccttctgatggatgtactggtttttcacagtagcatcagattccatagcacttatttcataaccatataaaaccatcatgtagtgagttgtaaatagaagcaaatacagatgttttgctttacattttgggactttgggctctcagcctcagtctcctgaggcaaaaagtacaaaattggtaactggtgatcatttttccccaagagctaaatatagggaagtcagagaagggaagagggcattatactgacagtagttatgctgacaccacagtattaccgcccactgcttctgttctctatactttctggatgcagattaccttttgcacaaagggcaaagattgagaaattaacataaaagtctaattccaaaagtatgtcttagacagtaatcaactgatattcctgacataatgttactttgctcaaagttgatgttggtagcaaaggaagttctcaatcgtgagtaactatgtacaatataaatatcaaattattacttggttattatagaagatgtggaagttagagtaaacgcagcaatgaaaaatgtcaaccctaatcttaagacagtttaaacttttaagcataatctatagtaagaaatacatttaaatcaccatctagtatatagatatagatataatattaattgaaacaaaagtttcaagaaacaatacttacccttataatttatgcactctgatatgttcgttctcttctattttgttccattctcctgtcttatcctatcctttactgtccaatcctactatctcctattctgttctatttcattatcacaaatacttgccaaaatccacttaagtgatttcatgatatacgaaatgagtctcaaccatatttgagccctagactagggaattacaatgagtacttgagcatcttttcttctagggcttttccatacactgttttcttgatataagtgagatcatagtatatatactattactctgcttttctcagtttgtattatatcataagtagtttcttcagccattaaaagatctacttgataagctttttaatggttgctggggaacaggtggtgtttggttacacgagtaaagtctttaatggtgatttgtgagattttggtgcacccatcacctgagcagtatacactgcactcaatttgtagtattttatccctcacccccttcccatcctttcctcctaagtcccccaaagttcattgtgtcattcttatgcctttgcatcctcatagcttagctcccacttattagtgagaacataacgatgtttggttttccattactgagttacttcacttagaataatagtctccaatctcatccaggttgctgtgaatgccattaattcattcctttttatggctgagtagtattcctccatcatatatatatacatacatacatatatatacatatacacacacacacacaccatatataaatacacaccatatatataccgtatatatggtgtgtgtatgtgtgtgtgtatatatatatatatatatatatatacacaccataatttctttatccattcattgactgatgggcatttgggttggttccacatttttataattgcgaattggattgcacaatatttcttgattgatatgccatcatttacctaaccagtgctgggtgttaggttgtttccagttttacacaatcataaatagtgctgcaatgaacacctttgtgtataatcttagcctatatttcacattacctgcagagagattttggaagtcatgtagccagatcaaaggatataggtaatataaagctctgattaccaacttgcttccagaaaggtttatgaatttacattcctattcacagcatattgtgattgtccttctatcctcaccagcatattattaatttccaacatatatcaagcagttaagatgtgccaggcactctgctaatgtatcacatacattatttcatttaatttgcccaatagctatgaaataaagatgttacccctgccccaccttagaaaagtgaagatggagtcagtaacttgccagagatcatgcagcctatgcatgcagagtcacggttgacatctggttctgggtgggcatggtggctcacgcctgtaatcccagagactctggaggctgagagggggaggcctgcttaagccctggggttcaagtctgtagtgagccatgattgcaacactgccctcccatgtgggcaacagagcaagaccctgtctctaaaaaaaattgttttaattaaaaaatgagaaaaaaggctgggcgtggtggctcatgcctgtaatcctagcactttaggaggccaaggtgggcggattgcctgagctcaggagttcgagaccagcctgggcaacacagtgaaaccccgtctctactaagaagtacaaaaaattaaccgggcatggcagtgtgggcctgtactcccagctattcaggaggctgaggcaggagaatggcttgaacctgggaggcggaagttgcagtgagctgagatcgtgtcattgcactccagcctgggcgacagagcgagattccatctccaaaaataatataaaataaaagagagagaaaataaaattgcctttaaagagcacttggtttttaaaattcttcttaatttggtagtttgatatcgtattttcattgatctttctctgatttctaatgaaaacaaacttcaataagttaaataatcattcgtagttcatcaagtgggagtgttctttttctttgcaaatttatctatcaaacccttcatgtatttcttattgattttatgactttggaaatatcaaatatgctgatcctgtatttcttgtgtttattgcaaatactttcctaagttttctttaagtctgaatgccaaaaatattacagaaataaattttgactattttttaatatgttcaaatctgtatatttcctttttatttttcctctgttgcttttaggttagaaagtccatcatgtaaattgtaaatattagttaaatatatgtccatattttcttctagttttgtttcataggttgcctttttttgttgttttttctgacacagggtcttactctgtcacccaggctggagtgtggtggtgcattcataacttactataacctgacctcaagcaatccgcctgcctgagccttccaagtagctaggactgcaggagcgcaccaccatgcgcagctacattttctaatttttttgtagagacagggtctcattgtgttgcccaggctggtctggaacccctggcttcaagtgatcctcccacatggtccttccaaagtgctgggattacaagcaggagtcaccacacccagcctctgttttttgtgtgttttttttttcccctttctgatagcatgttacatccatggtatatgatacatgttgtcagtgcatgcttaattattttccctaatcctagccacttgttctagcatcatttattacatatactttcatttgttaaaaacaatataggcctgggctagcactttgggaggctgaggcaggaggatcacttgagcccaggaatttgagaccagagaccagcctgggcaacacagcaaaaccctgtctatgtttaaaaaaaaaagagagagaaaacaatatagcaatataggatgcctcttttatcatatattaggactgtgtgtgtatgcatatatatgtgtatgtgtatatatatatactgtattttataatatttatatcagtatggtagctatttaaaaatatttctcatatacataatgtgtgtatgtgtgtatataacatacaaatacagtcagcccttcatatccatgggttctgaatctggattcgaccaactgcaggtggcaaatatttgagaaaaaaaattttttaacctacatcctcctgtatacttaaatcatctctagattacctataatagctaatacaatgtaaatgctatgtaaatagttgttatactgtattttttagggaataatgacaaaaaagtctacatgttcagtacagacaaaaaaaattttttctcaaatattttccatctgcagttggttgaatccagattcagaacccacggatatgaagggctgactgtattgatatgttatatacacacatacacatattatatatatgagaaatatttttaaatagctaccatactgatctaaatattataattttaccatatttttaaaaactataataggattaattatactttattacatgcccttaaaacatacttttagatattcttgtccatttttccaggaaaactttagaattattagtcatttttcatccaaatagttaaaattttaaaactcttgatgagaatttgactacatgtttgggagaattgacatctttctattaatcttccaattcatgaatttgatatatctatttattcaactcttcctttagatcactctgtgaagttttatagttccatctctttctcattgtcattaacaatggcaactttagctataaaaagaatggaatcatgtcctttggagcaacatggatggagctggaggccataatcctaagcaaattaacacaggaacccaaaaccaaatactgcatgttctaacgtacaagtggaggttaaacactgagcacaggggagagggagggagggggacctgggttgaaaaactacctcctgggtactgtgctcactacctgggtccaacacacccatttaacaatcctacacatgtgcccccatatctaaaataaaagctgaaatttaaaaaaaaaaaaaaaaagaatgacagctttaaaaaatttttcttactgatttgtggggaagctattgtttgaatttgttatgggtttttttttcccccataggcatctgtctcactaaaagctctttctctctgagtttttcattagattttcttgggtttcctaagtagctaataataatatacaagcaacagtgaccctcgttcctatagttacctctctcgttttcatttcatgcctcaccacatatgctagaatttccagaatttccatggcaaataccaggagcagtagtagccaccattgtagacttgatctggacctcaacaggttgttaaacattatgttgactcttggtttaagatatagcattctataactagcttgtttagaacttttaatcaggaataagtactgggttttctaaaacttgttcccagcatctgttaagattgccatatagttttttttttttttttttttaccattaggcctatttgtacgtggtatatattagtagatattgtattaaaccattttacattcttgttgtaaaatctgggtgctcagagtggattaatattttactattctgcattatatttgttagaattttacttgggaatgtgttcctctctcttcatagagtcaatttcttatgctatattgtcatatttttttctgatcatgttagcctcataaaatgactgggtagctttccatcttttctgtgttctgaaattctgactcagcttggggaattctctttccctgaaagtttgggggaactacctacaaaatgttagaacccttatccaggagcatttttgctttttaaaaaattttaattattccttatttataattgactcataataattgtaccaatttatcaggtgcagtgtgatgtttcaatgcatgcatgtgttgtataaacaatctgatcagggtaattaccatattcctcactttaaacatttatcttttctttgtaaagataacattcaaaaccttctcttctatgtgtcttgaaatatacactacattgttctttgcagagatcatactctaatgataaaggaatttggtgcagcagtgaagggcccaagctctggagtcagattgcctaggtttgaattccagttcagccatttactatgcctttggaggtttacttaacttttcttaagcctcaatttcttatctgcaagctctaattctgttgcattaccttataaggtcaatataaggattatataagataatttatttaaagctttatcaatagtacctgacagacagtaaaaaaaaaaaaatggccattattaattttccatttccttcaaagtgattgttacattttggtatttccatttttcgttatgacaattatgctaattggcatttttcaagaaagttgtctatttaatttagattttcaaatgtattgaagtaaagttgcttatggtatttaaaaaatctccattatctttgctaacatttttagtttgcattatttacatttttacaaaaacagatgcatgttattggttttgtccactctcttctccaccctctactcctattgcttgacctgtgttataaatactatttctacctttttctaccccatttttcgtggggttctgtttttgttcattttccaatctcctatattgaattcagttcatatttcctttaaaaaaaagagaatatatttaataatacacatttggctccacataaagttttactcataccaatttttttgacatttctcattttattctttcctataattattttagttcatttttggtttactatttattgagtagcatttttttttgtcagtatctcctggtataaacttacttttcttatttttctaagtgtgatatgtttcaaacatacagaaaatgatagggataatatacttggaataaattttcatatctaatattattgattgtgattagaaaatgaaatctagatacttctgttttaatatatggagatttttatagtgactagtataggatcagagctttaaggtatattctgttatgtggtacacaacttgttacaaaaagtctataaaaatctaataagttgaattaataatcattatgttttgcttatactgtagtcgagtgttaaatattgctggaggtgttttatcttatttctaatagtttatctctttaaaaatatgtttatcaagattgccactattttgttttttataaagttaattgccctttatccatgctttgaaagtttttaaagattttctaggaaatgtcatggtcaggtccttcatggaattcttttatagggggacaaattcaatctagaatctaaacttttcttgctaggagcttcagaccattgttacatgattgcatgtatgtatttgcctttttgtttagttttttgaggaagagtctcgctaccactgtgccctaatactcaacctccaaaaatcaccgtttactgggacgtggaattttacatcctgcagtgaacgccactttgtgtctctctgtcagaaatattcaggtaacaattattatctagataactatggtactttatgctattacatatatatatatagagagagagagagtcactttctatagggagggaggggaacataggttgaaaaattacctattgggtagtatgcttaccacctgggtccaatacaccatgtaacaatcctacacatgtaccccctgtatctaaaataaaagccgaaaaaattttttaatactataaaagaatttatattaatttataatcatatggcttaaaatttcagcatggctaaatccatattgggttagtgagtcagagtttatcaaatggaatgtgatttttttaaaggatcattgccataattaattaaattaattaattgtatctgatggaatttgttaatagtagttatcccattatagtaattgaattttgttcttttttctactctggcatttttcagattttacattttattatgggaaaaggagaaaaaaacttcatatttttaattgagtgcagtattgagtattaagtccactaatagtattcactgttaaatttagcattaacaaataaacaagtgggggtttgaaacattataaacagatcactgtctatgcctttccataatccaaataaaagtagaatgcatacttaaaagtaggcatcatccatattttgaaaaatatatttttaaaaaagtattacattatttttcattgatcacaatgtgtttttaacaaatgatcaagaaaaaattttgtcatataatgagaactgtaagtagatatctcatgtgctttggcagaatttttttttgctaaattaatctttacccattttttccatgtttttaactaactcctttattagcgaagtactataaagcaataattcaaatacctcctcttgtggatggtttcttacatttcttcatgctagctctcccaggtgaaaactttgtaaggggatacttaatacatttatttccttcaaacaaaagaggtatttagcaccgacatgacatgataatgcaggttacatttatttgcagatattctcttcataaatcagaaaaatgaaacagaatgttgttctgattttagaaaacaaatgttgcagctcacacattttccttaaggtatacagcaagacatacctaattctctcacccaaaatctaaaataaataggcaaataatatctaaattagattagtatggggagaaatgtgaaaaaaatgtcccataacttgcagagtgtggggaagggtttgttgttgttgttgttttcttttacatgcagaagttaaaagcagacagacgttgcagaatgcttcagaaactgtaaagtatctaaataatctgtacaaaataatcccaaagactctgacttggcacagtgctaaaagggagtgtctgaaaagtaacatgcagctggtgagcatcacggacccttaccagcaggcattcctcagtgtgcaggcgctccttcacaactcttccttatggatcggactcttcagtcaagatgtaagtgttcagtcccaactgccaggactgggtgatggaaagcgacattttttattgtgcatagcttctctcacagcagactaaaacaaacagaagaactgaaaatcttactccagtaaatttcatggaatatgtcggggtttttaaattttgttttgagacaaaggctcacactgtcacccaggctggagtacagtggtgtgatcacacttcactgcagccttgacctcccgggctcaagcgatcctcccacctcagcctcttgagtatctgggactgcagttacacaccaccatacctggctaatttttgtattttttgtaaagatgaggttttgccatattgcccaagctggtctcaaatgcctagactcaagcactctgcccaccttggcctcccaaaggtgctgggattaccagcatgagccatggcacctagcagcaatatgtggtttttagaggcaattatctttccactattgaaagatctagtacttcattgtttaaatgaggaaaaggttctggtggagatatatatatatttgagcacttctttttatttattctaatcaaagacgagctagaatctggagctgccatatctcttcagccaatgaaaagataagggaagaatttaaaaatcagttgtgtggaagcactatggatagtgttaaagagtcctttccatccctttctcttttttctttttcttttttttttttttgagacaggttcttgttctgtcacccaggctggagtacagtggtgcaatctcggctcactgcaacctccacctccaaggttcaagtgattctcatgcttcagcctcctcagtagctgggattacaggcatgcgccaacacgcccagctaatttttgtatttgtaatagagatggggtttcaccatgttggcaaggctggtcttgaactctttacctcaagtgatccgcccgccccaggctcccaaagtgttgggattagaggtgtgagccaccacgaccagcttccatccctttcaacatcagcagcatggctgggcaccgtggtgcacacccgtagtcccatttactctggaggcaagaggataacttgagcccaggagttcaaatccagcctggactacatagcaaaaccccagtctctagtttaagaagaaaaaattcagcaaagtaaaattaagcaactctgaaaaggaggttgaatagtgttttcctccatctcaagtgctgatcctagatagatgtctcaagcacttctcattcatttcagagcccaacaaagaatgctagtctcctactaattcgcatcactaacctctgcacatgtagcacaaaccggaatcattacacagctgaagttttggctataattaaataagggatttttaaataaagctgtggtattcctattggcattataggccacctcttttctcagccatggtatatcccaaagtataccaggatgggtctagggatgcatggaaaaaatgcgattgaagactcagaattgaactgaagaatggatggaaaaacaagaattgttatcaaaagctcaattaaaagtagcatttaggaatagcttaaagaatagtctctctgagccacagggtattctaaagttaacccagatcggccgggcatggtggctcatgcctgtaatcccagcactttgggaggccaaagtgggtggatcacttgaggtcaggagtttgggaccagcctggccaacatggtgaaaccctgtctctactaaaaatacaaaaattagctgggtatcatggcgggcgtctgtaaccccagctactcagaaggctgaggcaccagaatcacttgaacctgggaggtggaggttgcagtgagccgagattataccactgcattccagcctgggcgacagagtgagactccatctctaaataaaaaaattaattaattaattaaattaaattaacccagagcaagccaggagatggggaagctgcttactcagtcctcacagtctcaattgttttatagcattgcatttacttgctttatcttcagcattggaaattctgtgaaacgctttgttgtgtctgttgtgaggaaacaataggtgattacatttcctagtttcagtcaccctaaatcttttgagacaaaaacagtattgcaatgtagaaaatttgtcagtaattaaaagaacaaaattaaagtcacctgtaatgccagtacctaaaaataaacatgattcaatcaatattttggtatggatctttcaagttatttttctatgtgtacctatttattttttagacagttggaatcagactattttgtaactcccctccccacttaatgatttgggtcttacttcttatcctattttcaacctttacctatggttctcttttccctttcacccttaattttaacatattctgtgtagctgtttaactatatatcctaatagctgccttaattctttgaaaatgacaggatgttaataaatactttacattgaaagcaatgagaagatattgaaagattttaaacagagtagtggcaatataagactttacttaagtagacgacactgtgtggaaggccggggaggacgcaagcagctggagagagggagagcagttatttttctataaattcatgcaggaaatgctgttggcgtttacagtgtctgaggagaggcagctctgggttatgtgaagtgcagagtgtggccatgcagtgggtcactcaagtacccagcttgaagaaataaaaatacatagaattaaaggaagtcaagaaggcttggaaacatgaacacaggcatcccaagttaatggtaggaccgggaggacagcaagaattgggacatcttagtgaatgtcagggaggagcaaggcgaccaagtcctcagtgaatgtcatggggagtttgcagtgatacaaggggaataatcctgaaaggaaataaaaggagataaaaatatccactactcctttctcatagtcctgtggtatctgagaatagaatatcaaatagtcttcccctgtgggtgctgaaaggagattattcccttggaaaagccagatttatgtatttatttaagattcagggggtacacatgcaggattgttacaatacatacactgtgggatgctgaggcttgggcttcagttgaacctgtcacccaaatagtgaacacagtacccaataggtagtgtttcaacccttgctccactccctccccacttttggagtccccagacaatatcatgcccatctttacatccatgtgtacccaatatttagctcccacttatataagtgagaacatgtggtatttggtcttctgttcctgcattaatttacttaggataatgtcctccagctacatccatgttgctgtaaaggagatgatttcgttcttttttatggctgcacagtatgccatcatgtatatgtgctacatcttcttgatccaatccactgctgatggacatctagattgattccctgtctttgctgttgtgaatagtgctacaataaacatatgagcgcaggtgtattttggtagaacgatttgttttcctctgggtatatacccagtaatgggattgctgggttgaatggtaattctatttttgttttttgggaaatctccaaactactttccgcaggggctgaactaatttataatcccaccaacaatgtgtgagcattccctggaaaagccagagttaaattaagatcaattaagatcaagaatttagtgaaaagatatttatagtcttcatactttgtattcagtaaaaagataaaaggtgtgggatgatttatttagatggaatggaaattccaaaggatcagggacagggttaggtggggagtgcagcaaaggggaagaaatgcagggcagtctgaatgagtgcaggcaaagtcgcatggccgaagggccacactggaggccacagtggcttaggccctaactgggttaggttaggggctaggattacagctggaactctggtcatgaacatttcagaatgaagcagcgagtggtgttgaggcttgactgtgttgctgtttatggtttactaaggagactgtgtcgcttcgttccatatttcaaataaactagtgatgcagattgtcttgggactcaggaaagcttagctcagtgggtctgttaggccagcaccaggcccaccagtgggtatgtaaggtctctggcagcaccatggggaagctcagacaggcctgtaccccacaatccatctcctgtacctagatgggtggtcaggaccttggcagggtgtaaaggcagacgttcacagacctctagcacacaacagaatctagtgaatgaagaagcttctctccccaacaagtgtgaaaacagtgatgtgagagccacagcgcctgaagagttcagaggaagggaaccaccagctctctgtgtgccagctagcccctgggttgcgggctttacacatgttatcccattaattccagccccacgaagttaagtgtcacacttaacttggtaggggatggaaatttggagagatggcacatgaaagctagtaagtgactgaatcaggattcaaaaccatgtaggtttagctccgtagcccatattctttccactatgccaggtggtctctgatctaatcagtacttatagtgatcctcaccccattttagctttctgatttctgataaccagtggatccaattatgtgtgaggcagcgtagcataatggttaggacatagactctggggatcgacagcctggcagaaaggcccagcactgtggtttgtattctgtgggactttgcacaagttacatacctttagtttcctcatctttaaaatggagataataatagtacctctcctatatggttgttacaaggattaagtaagccaatatttgtaaagcatttagaacaatgcttgttatgtagtaaatggtatgtaaatgtgtattaaatattaaaaaaattaaaaatcattagattgaccatgggagtcaaaataatacaaagggttaacatcaatattgccacctgaaatgtacttctgctccttacaggatgaactcaactttggttggtcagatgggaaacgtcttcattttagtcgctgggctgaaactaatgggcaactcgaagactgtgtagtattagacactgatggattctggaaaacagttgattgcaatgacaatcaaccaggtgctatttgctactattcaggaagtatgtgaatttcagatcttttaattcttaaattattaacagtcccataagtggtagaatttctgaggagtggttttataaaatctggttttggaattgtgaagaaattatagtcatgtctttttatggcaacatttgttgtgaaaatttgtattcaagtagaattatatattacatatattattattaatgggtcattttaggcatgttttatttttatgtcagctgacaatggggattaacacttaaaatcccattgttactctacctctttctgcatatatttatagttgtagaaagcttacatttgtgagaattcttttgtgattcataatatcacaactaacaggacttttatgagtcttaagattcacagcaaccacctcaagctagcttaagacaaggggaaatttaggatccccaaaacggggatagagctgaacctataactggagatgagttgacaatttctaaatttcactttgtaaatccctagagaacatctcatgaacttagcctgagtcaggtgtgcagtctctagcccagtcagaggaaagtgtttttacaactggcaaggtcacatttgtgggtctgtggtagaaagaagacactgcttcatggacaaagggacttattgtgatccaggagagatactgagtgatctctgccacatattaaatcagtttaatgtatttgagtggaatatgtttatatttgtatctttgtgaatgtatggccttttcataaaatggaaaaagatcataatcagatactgtagatgtcagattttaaatattatttttgtttgacttggttaaagcaataacttatttagaacatcaatgtttcatttaaatgttcctttaaaattaatagtatcagtagacagaaactttaaaataaattctcagagttatagttaggtgacttttaataatgaatatgtttgtacagcatctctaggggtggtcccttgtacttgacatttggtaatgcaggaagacagaaactgcatttaacctaatagcacctcattttttacattcttccatgccacagcaggggtaagaaaattgtgtcaagtaatttccttcctatagaaagctggctttttgtgtgctatatctgagtataaacagagacaggcttcaccaggatattacttctcggcttcctgaatatttcctacaaatcaagcctaatgactgcaaacaggatttaacatttatatctcaaattagaattcttaccattaactctttttctagatgagactgaaaaagaggtcaaaccagttgacagtgttaaatgtccatctcctgttctaaatactccgtggataccatttcagaactgttgctacaatttcataataacaaagaataggcatatggcaacaacacaggatgaagttcatactaaatgccagaaactgagtaagtattatattagtccattctcatgttgctataaggacatacccgaggctaggtaatttataaagaaaaagaggtttaatggcctcacagttccacatggctggggaggcctcacaatcatggcagaaggcaaaggagaagcaaagacatgtttacatggcagcaggcaagagagcatgtgcagggaaactgccctttgtaaaaccatcagatctcataagacttactatcacgagaacagcacgggaaaaacccaccctcaagattcaattacctcccaccaggtccctcccatgacatgtggggattatgggagctacaattcaacatgggatttggatggggaaacagccaaaccatatcaagtatattatactgtcattacttattgtattttgctaattaaaaaaatatttcctgtgttataaatatttctaattagcactagtaactagatgacaaaaatattcatctcctaatatctacattatcagtgacaaagtattaaaatttgtgttagttaaaatggaaagtataggcataactcctttctttactcttccattcaagaactagtctatgtttgtaaggaaggcaggttctcctttaaaaggaaaagaaatgggctaggcacactggctcatgcctgtaatcctagttctttggaaggctgaagtgggaggattgtttgatgccaaccattcaagaccagcctgggcaacatagtgagactttctgtctgcaaaaaattaaaagcatggtggcacatgcctgtaattctagctacttgggaggctaaggagggaggatctttgaacccaagaggttgaaggtgcagtgagctgtgattgaaccacctgcactccagcctggataacaggtgaccctatctccaaaaaaaaaaaaaaaaaggaagggggaaagaaatgacacacaagagagcagagaactggacattaaatcaagctaggctatggggaagtgaaaataagttagttggagcagtcaaaagcttagatacaccacaaggcagcagctaagcttaaagaagtgcacatttcacattttcagctctcaagagtcttcagataattcctatgagatccactaaggatttgtgacttccaaatgatggaactgttggaaccaatggaacaatgaacttagtgaaagttgctatagaaaatatcaaaccagtatttcccaaagcatgctccgtataacatcagtcttgagagatggtctgcaaaaagtccttagaataaggttgaaaaaaataaccaacaaaaaagaaaaaggttgagaaacactagacaccatagcttcctgttggacattaacaaatgtacattaacatatgccttaagaaatactggcataaactagtttaattttgtttaaaccaatgtttgcaaactttttttaaaatccatgtagatcttttctgaaacttccttgttaattttgtgaggaacaccctttgggaaatattaagcctttttaaccctcatactgaaaactaaggaaaaggaagatctgtcgtatagcccagcagtccccaacctttttggcactgacagggaggggtggatggtttcaggatgaaactgttccacctcagatcatcagaccttagttagattctcataaggagtatgtaagctatatccctcgcatgcatagttcacaagagggtttgcactcctctgtcaatctaatgccacagtgctctaacaggaggcagagctcaagcggtgatgctcgcttgcctgctgctcacctcctgctgtatggcccggttcctaacaggcccggttcctaacaggcctggttcctaacagtaccagtgtgtggcccgggggttgggaacccctgttatagttcatctaagaggttctaattattatagcgtaatctttgacagtatatcattactatgggtggatttataccaactgaaaaattacctttaaataggggaaagtgaagtgaatcaatgttttaaattctctactcagctactagttttctattataccataagaccaaatttaacatcaaaacatttgaaaactccttaacctattaattttagtacaatgggataattttattttacatatgtttctaattgtccaatattgtttatattttgaagtatattaaactgagaactaaaatgttttaaacttatcaaatagaagtgtactagataagtaattgttaaaattattgattattttttattcaacagatccaaaatcacatattctgagtattcgagatgaaaaggagaataactttgttcttgagcaactgctgtacttcaattatatggcttcatgggtcatgttaggaataacttatagaagtaagttgtaaatctgccaactttctctatttgtttttgtacttcattataacataattatcaagccatagttcttcaaagtacatgtctatcaatacgtgaaagtataattatgtacttagcataacttacataaataccaagacagtttttatgtctctgctctgcctttatcatcgagtttaaagttaaatggcggaaaataattttctgaattagtttgttcccgcactgctaaaaagaactacccgaacctgggtaatttatgaagaaaagagctttaattgagtcacggttccacaggctttacagaaagcatggctgggcagcctcaggaaacttacaatcatgtcagaggcgaatgggaaacaagcaggttttactatggtggagcaggagagagagtgaaggaggaggtgctacacacttttgaacaaccagaactcattagaactcactcactatcacgagaacagcaagggggaaaatcacctcccaccaggcccctcctccaagactgaagatcataattcaacatgagatttggatgaggacacagagccaaaccatatcaattttcttttttcactcttttatgtagcaactcaagactaactaaaaatgatcaccatcccatataaatcttcaatacttattttttgtttccactaactatgtgagatgagcaagaacagaatcactctattagtgttgcagttttgggtttataaccctggcttagtttatactggcccacatatgataagcattagaaaaatgagacacatggccaggtgtagcgtcccacgcctgtaatcccagtactttgggaggccaaggcgggtggatcaccagaggtcaggagtttgagaccagcctggccaacatggtgaaaccctgtctctactaaaaatacaaaaattagccaggcatggtgacgtgtgcctagttacttgggaagctgaggcaggagaatcacttgaacccgggaggcagaggttgcggtgagccaagatggtgccactgcactccagccagggcaacagagactcaagactccatctcaaaaaaaaaaaaaaaagaatagaaaaatgagacacatggtctgacaatgggctcgaatatttggaatttggactaaataccaccaatccaaaatatgattgataacaaaattttttaaaacagtctaatatagaggaaacaaggtcttgtttctaaatgcttctgagcatttagaaagatgctcagaaatgtcctgaaaatcatagacattttggaattaggaaaacctttccacggccatagagcatcaaaagcatacatttactctaaagagggtttgataaggggcacaggacaatgataaccaggggtagggaaggaaaagaagctaaattactcaaatctgcctgttttaaaaataggcttctcctttgctctctaacccatctgtttcttggggttaccaatgttttcctgaaatgtttatggttggcagaggggttaatggaaattaaactatcaagcaatagataaagacttggtttaccaagtgaggataagttcatcatagtaggacttagttggcccaaaccttttctctgatgacacttaactacccttgaattaaaatggagaaaaactagctggaaaattctgaggcttcacctgaaagtgactgaagaaacaatggtcttgtattgagccatagagaccacacccaggacagagagattgaaattgtaccctttggtatactttgtagttatattatcagaagcaactgaaaatctattataaattctgaaaaagcatttttagatcagaagactcccttattgttttaccttctttcataaaatgtttgagtaataaaatttctattaaaatatacaggcatatgagggacatatagaaagacatttcaggcaaatggcacatttgatttgaatctcattcttactgacttaatttacatctgtaagttactgttttgggttactttgatatacttatatttaattttttggcccctatacaaggaattctgtttttaaaacagctttgacttttcaatagcagggccatgaatagaaatcactgtaagtcactgtttttggttacgttgatatagaatatttaattgtatttggcacctacccaaagaagtttgtttttttaaacatttttgatttttcaatagcagggccatgaatagaaattactatgagaagccacagtatgtcaactgagagatacattaagccaagtgaaaaaagtgactttttcttaaaacaactttagaaatctaccattgcacatcatattggtcagaaaattgataactttgaagtttaggagaagggaagaggaactggaaggcatgagatgatataaagcagcaaacaagaaccaaatcgtgtgtgcagtgcttctaatgtgtcattgctgcaggcagatgtttaggggtcttgccttgggagatggtaatcaatgaagaccagaaataaccaggacaacattgggtgtgtgtaggtagtgatggcatcaatctttataccaatttataattgtaatatgcctagcacctttttttaaagctttattgcaatcatcactaccccaaaaagaaacacaatacccactagtattccctccctgtctcctagtcctcagcaaccactgatctactttctgtctctacagattgcctgaatgtaaaattctggacattttacataaatgaaatcataccatgtgtgctttttgcgtgtgactggctttttccattaagcataaagattttaaggtttatccacattgtagcatgtatcagtacgttattcctttttatgactgaataaaattccattctatggatataatacattttatttatccatgtatcacttgatggacatttaggtaaaacaacctaaattttaaaccatttttaattattatgtataatgcttctctgaacattcacgtacaagtttttgcatggacatatgtttccatttctcttgggtaaacccctgggaatagaattgctgcatcttttgtttaaccctttgaagaactaccaggttgttttccaaaccagctataccattttccattcccggtatatgagagtactgatttctccgtatcgatgccaacatttgtgtgtttttcattatagccatctaagtgagtgtggaatgatatctcactgggatttttatttcatttccctaatggctaatgatattaagcatcttttcatgtgcttattgaatatttgtatatcacctttggggaaatccctattcagattttttgctcatgttttaaattgagtctttttattgtcgaggggtaagaattctttatatattctggatataaatactttccagtatttatatataaatatataaataatttccaaattattttaaaatttatataaaatataaaattttatatttctggatataaataatttccaaatattttctcccatgactttacttatgccacaaaagtgtttttctttttttttcttctttttttattgtactttaagttctggggtacatgtgtagaacgtgcagttttgttacataggtatacacatgccatggtggtttgatgcacccatcaacccgtcacctacgttaggtatttctcctaatgttatccctcccctagccccctaccccccgacaggcccagtgtgtgatgttccactccctgtgtccatgtgttctcattgttcaactcccacttatgagtgagaacatgcggtgtttggttttctgttcctgtgttaatttgctgagattgatggtttctagcttcatccatgtccctgcaaaggacaggaactcatccttttttatggctgcatagtattctatggtatctatgtgccacattttctttatccagtttatcattgatggacatttgggttggttccaagtctttgctattggaatagtgccacaataaacatacgtgtgcatacatctttatagtggaatgatttgtaatcctttgagtatatacccagtaatgggattgctgggtcaaatgatatttctagttctagatccttaaggaattgccatactgtcttccacaatggttgaactaatttacagtcccaccaacagtgtaaaagtgttcctatttctccacatcctctccagcacctgttgttcctgactttttaatgattgtcattctaactggcatgagatggtatctcattgtggttttgatttgcatttctctaatgacgagtgatgatgagcattttttcatgtgtctgttggctgtataaatgtcttctcttgagaagtgtctgttcatatcctttgcccaattttgatggggttgtttgtttttttcttgtaaatttgttgaagtttcttgtagattctggatattagccctttgtcaaatggatagactgcaaaaattttctctcattttgtatgttgcctgttgactctgatgatagtttcttttgctatgcagaagctctttagtttaattagatcccatttgtcaattttggcttttgttgccgttgcttttggtgttttagacatgaagtctttgcccatgcctatgtcctggatggtattgcccaggtttccttctaggatttttatggtcataggtcttacatttaagtctttgatccatcttgagtttatttttgtataaggtgtgaggaaggggggtccagtttcagttttctgcatatggctagccagttttcccaacaccatttattaaatagggaatattttacccagtgcttgtttgtgtcagatttgtcaaagatcagatggttgtagatgtgtggtgttatttctgaggcctctgttctgttccattggtctatatctctgttttggtaccagtaccatgatgttttggttactgtagcctcatagtatagtttgaagtcaggtagcatgatgcctccatctttgttcttcttgtccaggattgtcttggctatccgggctcttttttggttccatatgaagtttaaagtagttttttccagttctgtgaagaaagtcagtggtagcttcatggggatagcattgaatctataaattactttgggcagtatggccattttcacgatattgattctacctatccatgagcatggaatgtttttccatttgtttgtgtcctcttttatttccttgagcagtggtttgtagttctccttgaagaggtccttcacatcccaggtaagttgtattcctaggtattttattctctttgtaacagttgtgaatgggagttcattcatgatttggctctctatttgtctgttattggtgtacaggaatgcttgtgatttttgcacattgattttgtatcttgagactttgctgaggttccttatcagcttaaggagaatttgggctgaggtgatggggctttctaaatatacaatcatgtcatctgcaaacagagacaatttgacttcccctcttcccatttgaatgcccttcatttctttctcttgccagattgccctggccagaacttccaatactatgttgaacaggagaggtgagagagggcatccttatcttgtgccagttttcaaagggaatgcttccagtttttgcccattcagtatgatactggctgtgggtttatcatgaatagctcttattattttgagatacgttccatcaatacctagtttgagagtttttagcatgaaggggtgttgaattttgtcgaaggccttttctgcaactattgagataatcatgtaatttttgtcattggttctgtttatgtgatggattatgtttattgatttgcatatgttgaaccagtctttcatcccagatatgaagccgacttgatcctggtggataaactttttgatgtgctgctggattcggtttgccagtattttcttgaggatttttgcatcgatgttcatcagagatattggcctgaaattttctttttttgttgtgtttctgccaggttttggtatcaggatgatgctggcctcataaaatgagtgaaggaggagtccctctttttctattgtttggaatagtttcagaaggaatgttaccagctcctctttgtacctctggtagaattcagctgtgaatctgtctggtcctggacttttttcggttggtaggctattaattactgcctaaatttcagaacttgttattggcttattcagggattcagcttcttcctggtttagacttgggagggtgtatgtgtccaggaatttatccatttcttctagattttctagtttatctgcatagaggtgtttatagtattctctgatggtagtttgtatttctgtgggatcagtggtggtatcccctatatcattttttattgtgtctatttgattcttatctcttttcttctttattagtctggctagtggtctatctattttattcatcttttcaaaaaccagctcctggattcactgattttttgaaggttgtttttttgtctctatcgccttcagttctgctctgacgttagttatttcttgtcttctgctagcttttgaatttgtttgctgttgcttctctacttcttttaactttgatgttagggtgttaattttagatctttcctgctttctcttgtgggcatttagtgctataaatttccccctacacactgctttaaatgtgtcccaaagattctgatatgttgtgtctttgttctcattggtttcaaagaacatctttatttctgccttcatttcgttatttacccagtgtcattcaggagcaggttgttcagtttccatgtagttgtgcggttttgagtgagtttcttaatcctgagttctaatttgattgcactgtggtatgagagacttatgatttccattcttttgcttttgcttaggagtgttttactttcaattatgtggtcaattttagaataagtgcgatgaggtgctgagaagaatgtatattctattgatttgggctggagagttctgtagatggctattaggtccacttggtccagagctgagttcaagtcctgaatatccttgttaattttctgtctcgttgatctaatattgacagtggggtgttaaagtctcccactattattgtgcaggagcctaagtctctttgtaggtctctatgaacttgctttgtgaatctgggtgctcctgtattgggtgcatatatgttttggatagttaactcttcttgctgcattgatccctctaccattatgtaatggccttctttgtctcttttgatctttgttagtttaaagtctgttttatcagagattaggattgcaacttctgctttttttttgttttgttttccatttgcttggtaaatattcctccatccctttattttgagcctatttgtgtctttgcacatgaggtgggtctcctgaacccatctcatctgaacagcacattgatgggtcttgactctttatccaatttgccagtcgtgtgttttaattgggggcatttagcccctttacatttaaggttaatattgttatgtgtgaatttgatcctgtcattatgatgctagctgattgttttgcatgttagttgatgcagtttcttcatagtgtgaatgttctttacagtttggtatgttttgcagtggctggtaccggtttttcctttccatgtttagtgcttccttcaggagctcttgtaaggcaggcttggtggtgacaaaatctctcagcacttgcctgtctgtcaaggattttatttctcctttgcttatgaagcttagtttggctggatatgaaattctgggttgaaaattcttttctttaggaatgttgaatattggctcccactctcttctggcttgtaaagtttctgcagggagatctactattagtctgatgggcttccctttgtgggtaacctgacctttctctctggctgttcttaacattttttccttcatttcaaccttggtaaatttgatgattatgtgttttggggttgctcctctcgaggagtatctttgggttgttctctgtgtcttctgaatttcagtgttggcctgtcttgctaggttggtgaagttctcccagataatatcctgaagtgtgttttccaacttggtttcattctcctcatcactttcaggtacaccagtcaaacgtagatttggtcttttcacatagtcccatatttcttggaggctttgttcattcctttttattcttttttctttaatcgtgtcttctctctttatttcattaagttgatcttcaatccctgatatcctttcttccgcttgatcaattcagctattgatacttgtgtatgcttcacgaagttctcatgctgtgtttttcagctccatcaggtcactaatgttcttctctacactgggtattctagttagcagttcctctaaccttttttcaaggttcttagcttccttgcattgggttagaacatgctcctttagctcggagcagtttgtaattacccaccttctgaagcccacttctgtcaattcatcaaactctttctccatccagttttgttcgctagctggtgaagagttgtgatcctttggaggagaagaagtgttctggtttttggaattttcagcctttttgcactggtttctccccatctttgtggatttatctacctttggtctttgatgttggtgaccttcagatggggtctttgagtggacatgctattcttttctgttttttagttttccttctaacaggcccctctgctgctggtctgctggagtttgctggatgtctacccgactctgtttgcctagttatcacccacggaggctgcagaacagcaaagattgctgcctgttctttcctctggaagcttcttcccagaggggcacctgcctgatgccagccagagctctcctgtatgaaatgtctgtcggcacctactgggagatgtctcccagtcagaatacctgggggtcagagacccacttgaggaggcagtctgacccttagcagagctcgaacactgtgctgggaggtccgctgctctcttcagagccatcaggcagggatgtttaactctgctataagtccctgactgtggctgctgcccttttttcagagatgccctgcccagagaggagaaatagggccatctggccacagcaaccttgctgagctgcagtgggctccacccagttcaaacttcccagcagctttgtttacactgggagcgtaaaactgcctactcgagcctcagcaatggcggatgccactcccccgaccaagctctagcgtcccaggtcaatctcagactgctgctatgctggcagcgagaatttcaagccagtagatcttagtttcctgggctccataggggtgggacccacctagccagaccacttggctccctggcttcagcacccctttccaggggagtgaacagttctgtctcaccggcattccaggcaccacttgggtatggggaaaaaagaactcctgcagctagtttggtgtctgcccaaatggctgcccagttttgtccttgaaacccagggccctggtggggtaggcaccagagggaatctcctcgtttgcaggttgcaaagaccctgggacaagtgcactatctgtgccagagttcctcaggctcagtccctcatggcttcccttggataggggagaaaattccccgaccccttgcatttcacaggtgaggcaatgccccaccctgcttcagctcgccctctgtgggctgcacccactgtccaaccagtcccattgagatgaacccggtacctcagttggaaatgcagaaatcacctgccttctgcatcaatcttgcttggagctgcacactggagttgttcctatttggccatcttgccagcaatccatcacaaaagtgtttttcttttgtcatttgtgcatatgtaagaaggctttgcttaccccagggttatgaagacttactcctatgttttctttcttttcttttctttttttttttttgagacagacttttgctcttgtcaccgaagctgaagtggtgcagtggcatgatcttggctcactgctacctctgcctcctaggttcaagcagttctccagcctcagccttctgagtacctggtattacagacaaccgccaccacgcccagctaatttttgtatttttagtagagatggggttttaccatgttggtcaggctggtctcgaactcctgacctcaggtgatctgcccacctcagcctcccaaagtgctgtgattacaggggtgagccaccatgcctggccttccatgttttcttctaaagattttatagctgtagcgcttatatttatgtctgtgatctactttaatttttgtgtgtggtgaaagaaaggggtccaacttcattttttttttttttttacatgtggatatccagtttagaagactattctttccacactgaattgtcttggcatccttcttaaaaatcaattgactggccaggcacggtggctcatgcctataatcgcagcaatttgggaggccaaggcggatggattatgagatcaggagttcaagacctgcctggccaagagggtgaaaccccatctctactaaaatatacaaaagttagccagccgcggtggtgggcacctgtaatccctgctactcgggaggctgaggcagagaattgcttgaacccaggaggtggaggttgcagtgagctgagatcgtgccactgcactccagcctgggtgacagagtgagactgtgtctcaaagaaaaaaaatattaattgaccataagtatgcacaactgtgaacagtttatgtccagagaagagatttctgtggtgacttttataacttatcaatcatgttttaaataaataaaatagttatgttcatttccatgcaattaaacgtatatgtaagagaaaataatatttttttatttcaataggtttttggggaacaggtggtggttggttacatagataagttctttagtgttgacttctgagattttggtgcacccatcacacgagcagtgtacactgtacctagtgtgtaatcttttatccctcatcccctcccactcttccccccgagttcccagagtctattgtatcattttatgcctttgcatcctcatagcttagctcccacttggtgagaacacacaatgtttggttttccattcctgagttacttcacttagaataatgatctccatttccattcaggttgctgcgaatgccattatttcattcctttttatggctgagtagtattccatggtacatatataccacattaccacattttctttgttcacttgttgattgatgggcatttgggctggttccatatttttgctattgtgaattgtgctgctataaacatgcatgtgcaagtatctttttcatataatgacttcaagaaaagaatatttgatgacaaaaatgaaatgttattactgaaggatggtggaattataggtcaatatttatagtttgtatttatattcaaattaaaaatgagcatgatttactgttataatcagaaaatatcttaaagggttatacataatcatacaaccttttagaaggttgggaaaagagaaaattagtcaagtttgaaatcttaactgtataagtgtaattcaagtcttgatttaatctctaagcataggaaaaaatgtttcttctctagataagtctcttatgtggtttgataagaccccactgtcatatacacattggagagcaggaagaccaactataaaaaatgagaagtttttggctggtttaagtactgacggcttctgggatattcaaacctttaaagttattgaagaagcagtttattttcaccagcacagcattcttgcttgtaaaattgaaatgggtaagtatagtaaaatatagagttttctttcactccagggaaagaatataaggctattagttccaccagtgggaatcatacaatcaaatgcttcctctgtattcagtcctgtgcgaggtgttacagaggttatcgaggaaggaaaagatacgggccctgctgtcaaggttttgaccctaaggagtaaaatgtagttgtggagacagcattaaattccttatcattgtttaatgtaaattggtcttagattaattgatacaggcttaaattgtggggaagtcaaaaccgatacattggaaaggggaataacaaaaaaaaaaggaaaggcttcaagaagaggtgaaacttggttggggtttgaaaaatggatagggtttatataaataagaaagtgtttggggaacgagttttaacattccgtgcaaagtgaatgtctctccaccttgcttaatctttaaataaatctatttttaaatatatgttagttttaattttttcacagcttaaaaactgttaattattaccactgtgccctaaaactgtcattactcccactgtgcccaaagctccctgctcactgggagcccgtaaaggtggagtgctggctagttggctcacttacagcgccgcagtcacttcccaagaccgtgtccaccagcaacctccagggattccttattctaacctactttgagtgcatgtaaacttttgagacattttagaaacttagtctctatccccagtttctaggccttctcccagttccctgtttttccccattcttgctcagcaaagcatctttttctcaatcaagctggtctcttcattgtcccaggcacagtgtatgcccatcctcatacttgcacctttatgttttccttctgccaagaagttttccaatttctttctttctttattttttttacatctttaataaacttttcattttaggatagctttagagttacagaaaagttgcaaagatagtacagagcattcccatctaccctacaatcaatttcccctactgttggcatattactttagtatggtacatttgtcacaactaataaaccaatatttatccattattatctttaactaaagtccacacattattcaaatttctgtagtttttatttaacatactttttctttctaggatcccacctaacctttagttctcctgcctccttaagctcctcttggctggctgttttctcagacttttcttatttttgctggccttgacagttttgaggaacactggtcatgtatttggtagaacgtccctcagtttgggttggcgtatgtttttctcatgattaaactggggttataagtttttgagggaagaccaaagatgtgagggagcattctcacttcacatggacagcatgtactattcatatgacttatcactggccacctggcccaaggtagtgtttgttaggttctctgctgcaaagttacctcttttcctcctttccatactgtcttctttccaaggaagtcactatgttgagtccacacttaatagggtagaaagttatcctccaccttcctatgaggggagtatcgatataaattacttgaaattcttctgcacaggatatttgtctattttctccaatttttattttattttattattttatttatttatttatttttttggagatggagtcttgctctgtcacccaggctggagtgcagtggcgccatctcagctcactgcaacctctgcctcctgggttccagcgattctcctgcctcagcctcccaagtacctgggattacaggcacgccccaccatgcccagctaattttttgtatttttggtagagacggggtttcaccatgttggccaggatggtcttgaactcctgacctcaggtgatccccccgccttggcctcccaaaatgctgggattacaggcgtgagccactgcacctggccccaatttttaaatttattcagtcatttatttataccctcatcattgtagtttttttgttatttgtttgtttgtagcacttccatactttctccttaccttctttttattcttgatttcccccaatcctctagacctagtataggttcattgttatttattttatactttggattataatctaacatactgcattctgtaatattttgcttaagtctttccagctttggcccttgggagctctttcacttggctcccatgtcccttgaaataacctcgtcattgtggctttgctgtttgtgcttgttttaagcacttccttactttctggttcccttatttctttttagtcttaatttcacctaacccttgagacctggtttatcaagtagtcttcctgactcttctcattcaaatgaatctctaccaatttcacataccctactggttaacagttttgccatcatttcagccattgttgtttctgtctccaactaatatatgagcttcttaaatcaaagaaaatgtttatgccttttaaaatatcaatcagagaactttaagagcctaagatatgtgtcataccagtaagaaaaataaaatatacatttgacctcccttattaataagaaacccagttttatttaacttttgaaatgattgcatgttgtctcatccaaaagatgtatttgaaataatttaaattttaatcaccagtgcttttaattattatagttgactacaaagaagaatataatactacactgccacagtttatgccatatgaagatggtatttacagtgttattcaaaaaaaggtaacatggtatgaagcattaaacatgtgttctcaaagtggaggtcacttggcaagcgttcacaaccaaaatggccagctctttctggaagatattgtaaaacgtgatggatttccactatgggttgggctctcaagtcatgatgtaagtcttgcttcgttttccagaaacttttcaaatgtgttattttgagggttagaaatttgagcgtaaagtattaacacaaagtacaacattagatgaagtactgggactccgcttgcatagcatggtgctttcttaccttttacaacacagaacaaatagaaaattttactgtagcatgcactaggacaaatgatcaggccatcccaagggcccagtggatgactatctcaacaacacctctatagcctatttgggacagacaaattggaaagctgataaaaatgaaatagcatagaatcagaaaaccctgagtttgagtaccagtagcagatcttccatttatgtgctgggtgatcattaacctttgcaaccttatttcctcatgtagaaaatcagggtaataataatttcactgagattttaacacaaaagtttatacaaagtaccatctaaaattctccacatggttaggactaataaacgtataccttcttcccacttttcctctagaaaattatactacttaggattaattctgctagtaaagacatctgtgccactatttgaatcatattatttaatcatttatgtacttacagtagggtcttgtgtacaaaaaatggttatctattgagactagagttgtagttttaatttaaataatctttagaacagagtggggaagatttttttttaaaagcatggcaagttaagattataaattcaaggaaaattcaaaaatagtcttcccattttgagtttcttgggaagtgtttctcttttctagctccctactgcttggtgtcctctgtagtgtgaaaaatgtagccagagacacaaaacacaaaactataaaacacagaaaacaatattcagaacaatatgaaggttgggattgtaaatttgtaattatgacaaatggaagccatttgcatgttgtttaatttcgagtgtcacataaactcatccttcaaaaaaatctgaagaccaggtgtagtaactctgtctgtaagtttaaagttctccataaactgtatcagagcaaatgtcccaaatcaatgcatcagaagtaaatcagacctacaataatagtaggttcagacctacaatactgtaagcaaataattaatattccattataatatttcttaaagtatgtatgttgttctttgtattctttttgaagtcaaacatctggattcaggttatctctattgttcttacaacagggaagtgaatcaagttttgaatggtctgatggtagtacatttgactatatcccatggaaaggccaaacatctcctggaaattgtgttctcttggatccaaaaggaacttggaaacatgaaaaatgcaactctgttaaggatggtgctatttgttataaacctacaaaatgtaagacttcaatttcagtaacagtacatttatgaaaatgtgacataatttatgcacataattaaaagctcagtggaatttttatttaaagatttattcacaagggccgggcgcagtggctcgcgcctgtaatcccagcactttgggaggccgaggcgtgcggatcacgaggtcaggagatggagatcatcctggctaacaaggtgaaaccccttctctactaaaaatgcaaaaaaaatagctgggcatggtggcgggcgcctgtagtcccagctagtcaggaggctgaggcgggagaatggcgtgaacccgggaggcggagcttgcagtgagccgagattgcgccactgcagtccagcctgggagacagagcaagactccgtctcaaaaaaaaaaaaaaaaaaaaagatgtattcacaaataatttttgtgaaaataattttgatactttgtaaatggaaacaaatacagtataagcactcagggaatttattcccaatgactttcatttgttctgtcaccaggtaaattctaccctagaatttgtgaattctaatttcacttagcaatgtttttcaaaggctgagatgcttatttcaaaaaagggtcccacaacatataaatttggggaacacctcatgtgatttaccgtattaaagtttctaagagagtttcttttcttttcttttcttttcctttcttttcttttcttttttcttttcttatcttttctttttctttttttttttttgacagggtttcagctctgttgcccagactggagtgcagtggcatgaacatggctcactgcagccttgacctcctaggctcaagcagtcctcccaactcagcctcctgagtagctgggaccacatacacatgccaccacacccagctaatatttaaaatattttgtagagttagggtctcacaatgctgttcaagctggtcttgaactaggatcctaggctcaaacaatcctcctgtttcagcctcccaaagtgctgagagtataggtgtgagctactacgcctggccaaaggttctaagagagtttctgtaataatgaagtctgtttaactttgtgtaaccaagcattttccaaatttatatgatccttaaagtttaagggaagagcctcttccattagaggctggacttagggtcacccctggtggataaagcatgaaccttgaggaagaccacaaaaaaacaaactaccggggactgcagaggcctgcaggacaggctggggggtggtggcattggtttccgaagactctggttctcaatgctcaccatgttttctgctctgaagaatcttgaacggcagattcaacatttggttgaacagattcaggccgaagaaaatgtgaaaactttagagaagcaggttaataaaagaaagggagaatgatataaaggatgaggaatcaaggtacaatcaagaactgacttctcagttgttaggcacagaaaacaaatgtaactctttagaaaaacaattggaatacatgagaaataaggcatgcagaaatagagaaacaggctttataggatagagaatgataagatggccagacataagttctgtgctctaccaggttgaagagtgcctcctccccaaagattcccgtccagtcagaaccttagaatgtgactttactgagaaatagtctttacagatctaggtagttgaggtgaggacatattggataatggtgggccctaaatccaatgactagtgtccttataagagggagatacagacacacagagggaaaaagtccacgtgatgacaaaggctgagattgcagtgacagagtgataaaccaaggactgtcggcaaccaccagaagatgagagggaggcacgagacagattctccaatacagcctccaatgaaaaccaatcctaacaccctcttcaattcagacttctagcctccagaactgtgagagcatacatttctgttgttttaagccaccaattttgtggaatttattatggcagcccaaggaaacgaatacaagggctaactttaaaaactggatcttcaaaaaaaaaaaaaacaaaacagagaataacaggcattagtgaagatgtggagaaaatggaacccttatgcactgctggtaggaatataaaacagtgtaaccactgtgcaaaatggtgtggcaattcttcaaaaacatgtacataagattactatgtgatccagcacttcaggtatatactcaaaacaactgaaagcagggattcaaacaggtgtttgtacaaccatgtcatagcagcataattcataatagccaaaagatgaaagcaacccaagtgtccatggatggacgaatggataagaagccttaaaaaggaaggaaatgctgatgcatgctgcaacacagatgaaccctgaagacagtatgctaagtgaaataagccagtcacaaaaagacaaatactctatgattccatttatatgaggtagtacccagagttgtcaaattcatagagacaggaagtggaatggcagttaccagggactagatggaggggaatatggggagttattgtttagtgggtatagagtttcagttttgcaagataaaaaattttagagatgggtggtggtgatagttgtacaacagagtgaattcatttagcaccacgggactgtacacttaaaaatggttaaggccagatgtggtggttcatgcttgtaatctcagcactttggggggctgagacaggtgggtggcttgagcccaggagttcaagaccagcctgggcaacacagtaagactccgtctctacaaaaacgtgtaaaaattagctggacacagtagtacatgcctgtaatcccagctacttgggaaactgaggcaggaggatctattgcacccaagagtttgagactgcagtgagctatgattgcactactgcattccaacctgggtgacagaataagaccctgtctctaaaaacaaaacaaaaccaaaatggttaagatggtaaattttatgttatgtgtattttaccacaattaaaaaaaatggatcttcttgaacaggaatgtaacacacttaccacgatgcaagcccttacagaaaaaaaaaaaaaaagagttggaagcaaaacttcatgaagaacaagaagaaaaaaaaatgtacgcagcctaagagaccccagttgcagactatactagaaacaaatagaccaaagataaggcagttccttatgttgccagtgcaagaagtaatgttaaaaaaaaaaaggtcaaaccattcagaaaagttccctatcctaatgatgccataataatcaatgttcaacaagttttgcattaacaattgagcccagtgcaacaatgagtaatcagcaatatacctttgcccaaccaactattttcataaggtggtaaaaacaagaacttactagtaacatttcttttcaacagcagcattgatgaggagttgtgagaagttttatagattgtatagatgaatttggcaaatgcattttgatctgcagcagctgggaaacttacccaggagtccaactgctgaactgaagacttagtactcaaattggtgtgttagtgagaagaatggaggcaaaagccaatcaaataaccgaagttcaaaaagatcaagtctggtttctaacagaagatagagaagcagcagaaggaactaagggccactaaagagtctcacagtagccgccattcctctctaatcacagagaccacaaataaggactctgccaagtggagatttggagaaaaaaacagaaaaagcctttacttactgaaggacataaagatcatacagaatgcattacaaaacaatagtttgggttgagattactgactggtaccaggtcagatatttgattcagataagctgtaccgcactaatacgacattgacaatttactttccagttttcatatgctcttcggttggaattaaaaacaggtgttaaagggcacaagctgcattcctcaggctgcttctgttactcagcacaattaaaaatcaatttaaatggaaaccaggggcatttttaagagctaagaagccactcctagtctttttttgtttgagtgatgttgcggtgctgatgtattatgctttgtaaaacaaattagctatttttaaaaaatagttcttcttatgactaagtaaaactagatttatttagattatcaaaataaaaaggaatccaacgggctaggcgctgtggggtcacgcctgtaatcccagcactttgggagcctgaggcaggcaaatcacttgaggtgaggagtttgaaaccagcctggccagcatggtgaaacttcgtctctactaaaaaaaataataataaacaaaaaaaggaatccaaagaaagaaataattttaattattatttcagagtactttcaggtctgcctggcctgtctttacttctttttctagtctgtctttctcattgtttctactttagtccaaatcagtcttagaaagctaaggcactttccacttctatcacctaggttttttaaacggtattccaaaaagttaattaaaatatgtatttatagagtgtgggctgtggctttctctggtatgagttaaatgctactcaaccacaaacgcaacagttccaatcagggacattgaagtagattttgaaaggcagtcttttttttccatgcattgttacaactgtgtctaacatttttatagctaaaaagctgtcccgtcttacatattcatcaagatgtccagcagcaaaagagaatgggtcacggtggatccagtacaagggtcactgttacaagtctgatcaggcattgcacagtttttcagaggccaaaaaattgtgttcaaaacatggtgagttaaaatttgttgattttcttatgactcaataatttttagaaatgtttcttaaggatataatttgaagcaatgattgtatttttgaaaatatttttaaagcactttccatttctaatagcgctataaactaattgcccagtggtagggaaatggttaagtatctgatgacataggaactcaatgaaatattggaatagccattaaaaacgcctgtaatcccagcactttgggaggccaaggcgggcagatcatgaggtcaagagatcaagaccatcctggccaacatggtgaaaccctatctctactaaaaatacaaaaattagctgggtgtggtcgcacacacctgtagtcccagctactcgggaggctgaggcaggagaatcgcttgaacccaggaggcggaggttgcagtgagctgagatggcaccactgcactccagcctgggtgacagagcaagactctatctcaaaaaaaaattatcaatgttaataataagtacatggaaaataataagttggaagaagtagaattttaaagtggtggctgggtgcggtggctcacgcctataatcccagcactttgggaggccgaggtgggaggatcacttgaggttagccattaaagactagcgtgaccaacatggcgagccctcgtctctactaaaaatacaaaacttagctgggcgtggtggcgtgcacctgtaatcccagctacttgggaagctgaggcaggagaatcacatgaaccagggaggtggaggttgcagtgagccaagactgtgccactgcgctccagcctgggcgacagagcaagactccatctcaaaaataaataaataaataaaataaataataaaaataataataaatgtaaaataataaaataaaagtggctaagtgaactgctaagtaaaaatactgacaaatgattggaaacggttttacctatagctagatatgcttagaaaaaggaattaagaggtaaaatttttgtaaagttagctaagtagtaaataaaaattatagttgttccattgcttagttattaatacataagcttagcctcaccagggtaacaaatcaaagtagtatggttgtccatccgttctgcaataggattggccacatcctctgaccaccataaagggcagtgctttttgccttcagatttagctattttagaaagagtagcaatgattggctctttcccgtgacaaatttgatccatagtcaaactgtaaaatgacttctaggggaactacctagagtatttcaaagaccaaaacttgtttacctgcttccttgggtagcaaattagccaggtagatggatggcatttatctaatttattctgataaccgttgtggagacacttgactgattgaaaaatcttgtagttaccgggaacttttgtgtgggaaccattcggttttatacctgaatacacatgatggaaactgttgtaagatatatgtatgttttgaaagtcataaacctttttctcctaaaggagaaaacagaatggtttactgtaaaactaatatgtaggttaagcacttaagacttggaggcatgagggtctgggttcaaatcccagttcccacatatcctagctaagtggcattgggaggttacacaactctttctcttttctcatctgaacagtcagagaggtctcaggggtaggcagttccagggccaaaaaaatattgccagataaatattttgaagaaacacaaaatttctttatacgtgtttggaagtaatttttttgaagtacttataaaattttgacctaaataccagtttttaaaaactgtctctgtgtaaggcttgaatttatcaatgatcttgttaataatatatgtatttttcaaatggctagttgagaataaactacttctctagtttccataaagctaattgagaatgtgttttctttcaacagatcactctgcaactatcgtttccataaaagatgaagatgagaataaatttgtgagcagactgatgagggaaaataataacattaccatgagagtttggcttggattatctcaacattctgttggtaagtgaaataattgtatgtgtagtgtgcaaagagagttctaactcatcctaaataacaagtcgtccttgctaaagaatgttaagtagtggctaattcagatgcctcttctggataaataagctaggtcgctggctgttctggatggttataaattttgaatgaatccatgagttaacttagcaatgacggaaaccactaatgacacagaaaatcctgttaaataaagtggaatctttctagaggcttatttctgggatccttggatcaacatcaggacattttcttctccacaggaatgtctgtgtccccacaaggaacccatgcctgccttctcttagagttctagtgcctgtcaccgcatggatttgcagcttataacttcgttattcagaaagttatcttcttgttattcccttctctctaagaatatttttaccactggttaaaattatgtcttaatagtaatctttaaaaactgtcttagtgttaggttggtgtgaaagtaattgcagcttttgccattacttttgcgccaacctataaaattgcagataattgattcaaagaaaatttgtggaaggattttttaatacgaaatagtagatacagggtttaggtgaacttggaattggtagaaataagagtacaaatatgacagaagataaggtttttcacattttatgcaaagttgaattttaaattattaaaatgtgaattttaaaatgttaagtacttgtcaaaaaataaaaggattccaagttgtccatctaaatgaatcctaaatcgtgtttacactgtcaccacaaggtggtgccacttcagctggaaagcaaaaatggagtcctggtggtggtgtgggagaaaggtggggatggagattcctgcacccttcctcttccaccagcatatctttaatgatatgactttttacaattagagtaggggaaggatatgggtccttagaaatctctccctcacaaaataaatgtgcaagcattctgcactttaacggaaacaccacattctctatctgtgttgtccaatagaactttctacaaagacagaaatgttctatatctgcactgtccaatatagtagtcactggccacatgtggctcttgagcacttgaaatgtgactagtgcaactgaagaactgattttatttttttcatttttaatgcattttattttaacaagtggctctcatattggacagcacagttctgatgagttacatgaacccatgcttgtaacttactagtttagtggcagtagacatagttgtatttaatttctttcttcagaccagtcttggagttggttagatggatcagaagtgacatttgtcaaatgggaaaataaaagtaagagtggtgttggaagatgtagcatgttgatagcttcaaatgaaacttggaaaaaagttgaatgtgaacatggttttggaagagttgtctgcaaagtgcctctgggtaagtatggaacctgtccttaggagactttttgcagaacagtcaggaaataaatgtacaatccaattatgtacaaaattctgtatttagtcttgaagtatttagtccttaaagtatatccaactatcttgattaagtcatagagatttccccctgaaaaatagattacaagggacgataactgcacaagatgtccaggactccagtctacattttatataattctttcctaagaaaaacagaagttgccagggtattagggaagtaatttcttttaaaatgttcttgagatgtattttattctatagtttgattatataaaagcttaaaggtctatttctgcagttaatttgcttcctttcttcctaatcccataaaactcatggttaattttaaaacaatgcaaaactggatttagttattgaaaacattcagggtatctataaaaaatcataatttgaacttacatttcattatgaattgatacataaaattaccattaaaatgttatattaacttcatttctggagaaagagctccaaatttttcacagtaacatttttaaagatcttgcataaaacttttgcttcttgtatataaatattaaagataaaacctcaattctaggtaatcagtatccatgtatacacacactgagacagtaaatagagtgtctactatatgccatgccctgttttgcacactgggatgcacctgagaacaagacagataaggtacctgttctcacagagattacaatctggtgaagaaagataagtaaacaggtcaattttttaaagagaggaaaatatcaaatagttataaactctatgtgatggagactcagtggatagctactctagattaggaaaccagggaagaagcctagaagcaggagacaccgaagctaagatctaaaaaatcaagccaagcaaacttcaagggaaagggcataacagacagaggtaccagttggagcaaagagcctaaggcagaacaagttggctgagcgctcagggaagaactgaaaggtaggcaggtgctagacatacagagctttggaagcaaggcttgagttctggttttattctgagtggaatggaaagcaactggaagatttggggggttgggtgggagcagagttagggtgttgcaaatcaaaagttctacgttggccattttgagttatccatagagggacgagatgtgtagtgtgcatagcaatggtatttaaagtcatggaacagagcgaatccatctgggcagtatgcagataagggtcttggaacagcagctgcactaaatgaactcatctgagagacttaaatcattttgaagcaaataacactttatttagccccaggtaagtcaaaaacaaaaatttatagcttttagcaatttgctatcaaagtaggataatatacaagtagtgatgttcccaaattggtgttaggaagggggaatgtgagaataatcatagcgcattaatgtctttggaagaaaattcctatcacaatgaagaggatttgaatgaataggaaaacacttacatttgaaaagaaatcacttaagtgtttcttttgatctgacgatgagtttgaattctatgttagcgctatgaaacaatcagatttattatgtctgtatacagcttacaggtttacatgtgtgacacaacccataatgtataaaatcaataatgatcacttttgtattctctcctccaacatcaaaccttttcctgttccaggccctgattacacagcaatagctatcatagttgccacactaagtatcttagttctcatgggcggactgatttggttcctcttccaaaggcaccgtttgcacctggcgggtttctcatcagttcgatatgcacaaggagtgaatgaagatgagattatgcttccttctttccatgactaaattcttctaaaagttttctaatttgcactaatgtgttatgagaaattagtcacttaaaatgtcccagtgtcagtatttactctgctccaaagtagaactcttaaatactttttcagttgtttagatcttaggcatgtgctggtatccacagttaattccctgctaaatgccatgtttatcaccctaattaatagaatggaggggactccaaagctggaactgaagtccaaattgtttgtacagtaatatgtttaatgttcattttctctgtatgaatgtgattggtaactaggatatgtatattttaatagaatttttaacaaaacttcttagaaaattaaaataggcatattactaggtgacatgtctactttttaatttttaagagcatccggccaaatgcaaaattagtacctcaaagtaaaaattgaactgtaaactctatcagcattgtttcaaaatagtcatttttagcactggggaaaaataaacaataagacatgcttactttttaatttttatttttttgagactgagtctctctctgttgcccaggctggagtacaatggcgtgatctcggctcactgcaaatctccgcctcccaggttcaagcgattctcctgcctcagcctcctgagtagctgggattacaggcaactgccaccatgcccggctaatttttgtatttttagtagagatggggtttcaccatgttggccaggctggtctcgaactcgtgaccgcaggtgatcctcccgcctcggcctcccaaagtgctgggattacaggcatgagccaccgcgcctggcctctgcttactttttatatagcaaaatgattcctcttggcaagatgtttcttatattattccaaagttatttcataccattattatgtaaatatgaagagtttttttctgtttataattgtttataaaacaatgacttttaaagatttagtgcttaacattttcccaagtgtgggaacattatttttagattgagtaggtaccttgtagcagtgtgctttgcattttctgatgtattacatgactgtttcttttgtaaagagaatcaactaggtatttaagactgataattttacaatttatatgcttcacatagcatgtcaacttttgactaagaattttgttttacttttttaacatgtgttaaacagagaaagggtccatgaaggaaagtgtatgagttgcatttgtaaaaatgagactttttcagtggaactctaaaccttgtgatgactactaacaaatgtaaaattatgagtgattaagaaaacattgctttgtggttatcactttaagttttgacacctagattatagtcttagtaatagcatccactggaaaaggtgaaaatgttttattcggcatttaacttacatttgtactttatttttgtataaaatccatagatttattttacatttagagtatttacactatgataaagttgtaaataattttctaagacagtttttatatagtctacagttgtcctgatttcttattgaatttgttagactagttctcttgtcctgtgatctgtgtacaattttagtcactaagactttcctccaagaactaagccaacttgatgtgaaaagcacagctgtatataatggtgatgtcataataaagttgttttatcttttaagtaaaagtaaaagtgctggagttgatccttcttgaaaaaaaaaatctctagattgggttttttatgttaggcatatagtacaagaaataaattgaccacctattgtaaagcgaggcatttgctaagagattttgtgtgcattttttagagaataaataggcgggtagtggctcacacccgtaatccctcttgacactttgggaggccaaggcagggggatcatttgagcccaggaattcaagttcagcatgggcaacaaagcaagaccccatttctaaaaaaaaataaaataattagccaggtgtggtggcacccatgtgtagtgccagctactcaagaagccaaggcaggaggatcccatgagcccaggagtttgaggctacagtgagctatgaacgtgccactgaactccagtctgggtgacagagcaagaccctgttttgaaaaacaagtcgatattgatccaattgctgaatactggaaaggcaaagtcagataaaactggattctcggaattaggaaaccaatgaccatcttagccaatgcaaatgtagcagagtagtgaagccagaatccagatggaagtgagtttaaaagtgaaagggaaggccaggtgtggcatctcgtgcctgtaatcccagcactttgggaatccgaggtgggtggatcacctgaggtcaggagtttgagaccagcctggccaaatggtgaaaccccatctctactaaaaatacaaaaaaaaaaaaaaaaaaaaaaaaaaattagcccggtgtggtggtgcatgcttgtaatcccagctacttgggaagctgaggcgggagactctcttgaacccaggaggcagaggctgcagtgagctgagatcgtaccattgcattccagcctgggtgacagagcaagactctgtctcaaaaaaaaaaaaaaaaaaaaaaaaaaaattgaaagggaaattaggagatgaggaacatgagatttcgagaagtatgatggagacagaaaggaaaggggctgggccatagccagaggggaaagaagggttgaaaaagggtttttttctaaaggggagagaaagaggttcacaagtttagaagctgagatgaaaaaaacaaaaacaaaaacaaaaataatggacagagagaagttgatgatgcagtggggagagggaatcattaatggaagatcttggagaagataaaatgagaggggcagtcctaagcagaaagaggaactggtttgggtgggctggagaagcatgccttcctctctgagaccacaagagaagaactgcagataagcatttgaagatgtttgtctatatgtaatggcacctgttttcttgtgtactagaaggcaaggtctgctgagaaagatgggtagcagatggggtcttttaaaaagttttttaattttttagagacagggtctgtctcagttgcccaggctggaatgcagtggtgcaactctagctcactgcagtctcgacctccaacattaacttttttttttccctagagacaggtgatttcaatgttacctaggctgctctcaaactcctgggctcaagtgatcctcccacttcagcctcccaagtgttgggattacaggtgtgagccaccatacccagcctgggatcttagcttgaaaagagtaataaatttgaaagactcaatgagagaaataggagaggacagtgactaaggtaaaatcaaatacaaggattgcagaagaggcatagaaggcccagatgaaattaaaagccatattgtttatagtgacagccatcgggagaactgattgatttcctccacctgtcctcagttaacttcagtaaagttgaggaaaaagagagcacgggccaggcgaggtggctcatgcctgtaatcccagcactttgggaggccaaggcgggcagatcacttgaggtcaggagttcaagaccagcctggccaacatggtgaaaccccacctctactaaaaatagaaaaaacttagccaggtgtggtgatacacgcctgtaatcctagctactcgggaggctgaggcaggagaattgcttgaacctataaagtggaggttgaggtgagctgagatagcgcgactgcactccagcctgggggacagagtgagactccgtctaaaaaaaaaaaaaagcatgaagaagaaagcggagaccacagattccgagttggccaggtgagcacaccaggggaacaaggggacagaggatgtggtatttcggctgggtggagaagggagaaataaaaggctgagaaaaatgcaggcaagggactgaagtctggcatgagccaaaagaggatgtaagttggagacagagtgaaggaaaattaagggtatgaggtgtaactggagagtaaatgggagagcgaaatataacagtacccacatacaggcaataagtagtctatttcatcagattagcatcaaaaatgaggcagtgtgcaccagagttaacaataaaataatataattttctttagtacaaatgacttaaaatgacagtgttaaaatgggttttgccttaattagattgattcattaggatgtcaattctattgtaaatataaaaatatttgaaaagtagcttaacacaaaaccacattgataaaatatactttggtgcctgaggtgggggtggaagagataactttcacaattacatgattgcttagaactgttcattttacttctgtagttaggagggcaaaagggtccagaatcaagatgtgtcaatattccaatatagagtatctttggaaggatttgctctggtctggagtttggtatataataaactcagtattggcagcctgagaagaaaaatggaagtaaataagttaagcaagaccttaatactttggcaaaggggcagaacctggaataggtgggagagtccagcagaggagctgggctctggttcatttgttggcattctctgtgagcccacgggggaatcacatcccttctttgggtcactcaatttccttactagtaccacttctaacactctatgactctccttatagaccccttgggtcaaatttccttggtgtaaccactctggattatcagaagtgtggaaagggttagaaagagttggaaagggtcagattttatttttttaaaaatagactaatttttgagcagttttagatgtatacaaaaaatgtagcagaaggtacagagctcccatgtacctccttacacataccccagtttccccaattattaacatcttgcattagcaggtacatttgttacagtggatgagccaatattgacacattattaactaaagtccattgtccacactagggttcatcttcgttttgtgcattctatgggttttgacacatgtatagtgatacacatctaccattacagtatcctacagaataatttcatggctctaaaaatcctctgtgttccatctattcatcccctccttcttcccaccccaacccctggcaaccatttatctttttactgtctccatagttttgccttgtctaaaatgtcatatagttggaatcatatagtatgcagtcttttcagattggcttctttctcttagcaatacatatttaaagttcttccatgtctttttgtggcttgatagctcatttaattttggtactgagtaacatttcattgtttggatgtgccattgtttatccattcacttattgaaggacatcttgtttgcctctaggttctggcaattatgaataaagctgctatcaacattcatgtgcaggtttttgtgtgtatgtaagtttttaactcatttggataaataccaaggagttgtgattgctagatggtatggtaagagtacgtttagttttggaagaagcttccaaattgtcttccaaagtggctgtaccattttgcatttgcaccagcattgaatgagagttctttttgctccacatctttgccagcatgtggtcttgtcagtgtttttggattctggtatctaataggtatgtagtggtatttcatttttgttttcatatacaattcagcaatgacatatgatgttgagcatcttttcatctatttgccattatataacttctttgatgacgtgtgtattcagatcatctgaccattttttttaactgggtcatttgttttcacgttgttgagtttagacttgattttatagaactcttttgccaatgacatgaggcttaaacaagcacccttgcttgaccctggctagtgttgtccagaggccctcatgggtgaagtataattgcacagtttatgcatacattgtagcaaacatagcttaaagactcttcatccaggagctggtaacagagaaaagttgtctaagagacatagtccactgaaaggggtctttgaaaaggaggattctggccagtagatccaaagaagaaggctggcaaacgccaccttaaccaactgatccaagttaacatcagtgatgagacatcgacatcttgtccttctcgagcacgtacatcacttctggggaactctttcccaaaaaagcgcaacctgaatccaattagaaggaaatgtcagacaaaatgaaactgagggacattctacaaaacgactggccagtactttttaaatgtggtttgatcgtgaaagaaaaagaatgacagagaaccgtcctagattaaagggagactaaggagacacgacatgcaatgtatgatcctggattgaatcttggaacagaaaaggacccttagaggggcaattaatgaaatgtggtaagtgctgtagattagctaatcgcattatcccagtgcgagtgccctgtgtttgatcactgcactggcgttatatacaatgtcaatatttagagaagctggctgaagggttacggaaatctcttgtgctgtttttgcaacattttcgaaagtcctaaattatttcaattcaaatgaaaagtttaaaaaacaaaaattagaagttccagaaggccgcgcgccagccgctcctgcgggacgggacacccgggttctcctggtgggagcccccagtgccgttcacgttccgcccgggggggggattaaactcgcacgcgagaagcaccgcccccgctcccgccccgccccgctcctctccggccgcgcagccgctgccgcccacccgcacccgccgtcatgctccgggccgcgctgcccgcgctcctgctgccgttgctgggcctcgccgctgctgccgtcgcgggtaagcccttacgtagtccctcgccgggaccgtgcgcgaccgccttcgcccccttcccaacgcacgctcttcgtccccgcgcacccgagggcggcccgcagacgcaacacccggccggccatcccgcccttccctgcacgcccgtcccccgtgggtcctggctccgggtcacctctcacccgcctgccctcggggaggggaggtggccgagaataagggagggctctgtcttcctcggagtccacatcctcaccgcagaccccactccgcggggagggaacccccaaattaggccagttggccggagaactgagggacttggagtcgcacgacgggcgccgtttcagggcaatttcgggctgaaatgagaagcggggacgttggtggcgatttcccctgctggtgcgcggccggagtggggttgctgggatgggggtgggggccggaggaagtaggccctcttttgcaagcagcgctgtttgtctagttggttggtgttcaagttgtttaaacaggaaaacagttcagccaaataacccctggatggaagaggaacgggaataggcaaagcttggatttcactgaaatcaaggagttttaaagttctagtctgctgttgtgcaagtgacatctgaaaaatcacacacgtgatcattcatttacaaaacgactcgtgaggaaaatgcacaattctattgaccgtggtctttatttttaaaaaatttccatacaagcatgtcaaaaatatgtggatggggagactctggagaacacagacttccaaaaacaccactgactgaataattccaggaattaaagagcaaaataaacaagaactaaatgagtacttgtgtgggcttaaataaagtgcaagagatttaaataaaatgcaagagattccccccccccaccccttgccccagatttcactgcgtttttataataactgcctgctcgaagtctactgacaggaatatttcagtggacctcagtgttggaggcagcagcagctcagaacttggatacaaacccaaggttcctttcttgaaaacttctgtggacctgcatttatgactggttgtgacatctgctgcctatcaaaggggcagaaacaagatgtgcccatgttcacattgttcagactgggaacattaattttgtctaagacaaagctgggctgtctctgaaccctccttctgcacaccctcattttgcgagccagtaacatctcaactctcatgtaaaccaccctctgcgaggctgtgcatttgtactttaggctagtcgaattttcttgtcagatttttctttcttgtcagacttttaaagaaaatcagtttctagattttggtatgtctcttcttcagtgaagctgttttgaccagcaatagagggcaaatttccctttggaaatttttgtgcatttcctttgataagtccagtgtggatcaataggcttttcaagagctttagaaaagtgcatgatgaataaattaatgttaattaatcagctcctcccagtcaggaagctttaaggattaatttggaaatgagtgtgagctttgacctagctagttaaccaacttatctgcacttcagtaaaacagagataatacttactcatggggctattgggagcattaagtgggaactccacgtctagtccctattacaggcgtggttcatcttggtttccttccctttattctcttcatacaaaatgaagggtaattgttgcaaccagaaaacgtatgaataccaccttatgtatattggatgtttatggttactgaacacattcatatgtatgctaatgttatagggctgaaaaactaagtgtgtttttcataatactttacaaatctcccatccaagcaagatcaggggtcatatttggcttagaactaagtcaagaaagagtttgttgctgaataccaagatcttaatagaaaagctcttatgatgttgcataataaatatgggtattgcatataaatgtgatgttgaaacggaaatcattgttattgtctgtcattctggaggttattagtgaagtgatcttaaccttgttcttagctattattttgaaaatcacagtggacaaaacattctttaaattcctgagtgaaaatccatggcatcgctttaaaaagtttttccgtaagggtgcttaagcacataatagatgatcagtatgtatttatttggtcagtggtttcctatgcctggcatgagctgagtgaacaagcatgttccgagtaagtcctcattctgtgatcatcatgtggatcagaatctagggattttgaattgccatgtcctacaagccttagatgaggtgcctctgccttcttccctgatgtcatctcttaccacccttcctgccattcactctgtgtatccacagagtaaacagtatctgggtactccaacacctctggtccttctgtgcacaccaccttcccccagtccttggcatggctgcccccacctccaccattcagatctctgttcatatgtcaccttctccgaagcctccctgaacacccacattctctgtcacatgtccatgttttatcttttccaagcctttctgaatgcattgtgtttattcatctgtcttgcttgttgcttctcttaccaggggaaagaagctccataacagagattttaccatcttgtggatttttgttttgttttgatttgtgtctctgcactttattctaagttataataaaaggatgaaaaaatttaggtgagttatttaaaaagtaggtaggataagtggattgcaatttttttcaaattatattacctctgctatgcactcatttcataatgaattcaaagccttaaatcatcttaatctattgctgccaccttttctttctttctttttttttttttccgagatggagtctcactctgtcacccaggctggagtgcggtggcgcaatctcggctcacagcaacctctaccttctgggttcaagcaattctcctgcctcagcctcccgagtagctgggattacaggcatgcgccaccatgcctggctaacttttgtatttttagtagagatggggtttcaccatgttggccaggctggtctcaaactcctggcctcgtgatctgcccacctcggcctcccaaagtgctgggattacaggtgtgagccaccgtgcccggcctgatgccaccttttctgactcttgtgtatggcacagttatgtttcaggggaaattatctcagattaaatattagagtattttaaaataaattttgagctgggcgtggtggctcacgcctgtaatcccagcactttgggaggccgaggcgggtggatcacgaggtcaggagatcgagaccatcctggctaacacggtgaaaccctgtctctactaaaaatacaaaaaattagccgggcgtggtggcaggcacctgtggtcccagctactcaggaggctgaggcaggagaatggcgtgaacccaggagacagagcttgcagtgagctgagatcgcgccactgcactccagcctgggcgacagagcgagactcagtctcaaaataaataaatgaataaataaataaataaataaataaataaattaattaattttgaaatgttaatgtttatttttcttccaatgaaaaagtgaaatttcaattaggtattatttcaggacttcttttactgttgagaatcttttaacaatttgcttatgtgttgaaaactagttttgcagcaaggttactttccataatttttattgtgcatatcaagtatttcattccttctgtgggttatttagtgtttttttttttattattttattttattttattttattttattttattgttttgagacagggcctcactctgtcacccaggctagagtgcagtggtgcaatcatggctcactacagccttgacctgctgggctcaagtgatcctcccacctcagccccctgagtagctgggactacaggtgcatgccaccatgccctgctaattttttttttttttttttgtagaggtggggtctcactttgttgcccaggctagtcccaaactcctgagctcaagtgatcctcctacctcagccttccaaagctctgggattacaggtgtgaactgccacgcctggcctattttagattttgagagcaaatcttgagaccaaatctttaaaaaatagaccagtgatgcccaaagagaaaggtacagattaacaatggcacaccccttctatgaatatacattataacagcccttctgaagagggaagtgatgggacaatatggagatggatgtcttgaaagctagattgggaagagtgatatggagaggggatgaggtgtcagagtgcctcaatttatttgggattcagagagatcttgaagctcagagtacagccacagaatctctggattagtcagggacttggaacagccactccctcctccatacattataaatgtaataaatagcccctcttcttcatctgtctgtgccacagttgcccttgcggaagttatgtgactacaactcatatcttaatgggagaggagcaaaggtcttattattgacaatgaaaatgaaaaagaagtctttcccttttcctttgttaacatttagaacaagtatgtcccaagaatcacttcctcatgctgtgcctgttttttttttctttttttaaaaaaaagagagacagagaacttataaaggaacagagagttctattagatttgactggtaatgcaaagtattcctgtggatatgacattatcttcttttagcacatgataattttaggcagaggatctatatagaaacttttggagttatgctaagtacagcttttaaaatattcatgaggctcctgaatttctgtacgtattaaagaattataaaattataaaatccctaagagtcatttaagtgcattattaataacaacctatcattcaggactgctgtgaagaaataagagtaataggccctttgcagagagcttagtgggcaggtttttaattatattaggattatggcaaagatacttagcgttgaagacgacttagtttagtcttttgttcatgaggtgcatgaacgtcaacaatctcctcacaggagttatccagcctctatttgagcactgttcttctcaaagtaaaaatatatcttttgagtagtgcttaaaacttgtttctggggcacacactctgatcggggatctatagcatgagaaaaggggttccatgttgaattaactggagttactgctaatgctgaaatgagcctaaggagaaggcagttgaaagttttggggaagtgagtcaacagtctgttttctatttttctatacataccctgttaaaaaaaaatttttttttggtcttgtcacatgcagatgctcctcgacttagaatggggctatatcccaataaacttgtgaagtcaaaaaatcgtaagttgtccattattaagttcgggaccatttctgtattgctaacttagttattcagcaatggtctttgagtagctggttatcattatcatcatcatagtcattcccatactgtgcaacacagtagcattgtgtttgctcctccctctgtttgcctgaaatatccatgtgacttctttccctatcttttcagacacacacacacacacacacacacacacacacacacacacacacagagttggttctctgtttctctggagaaccctgactaatacaataaccaataagatagtatggaaataagacagtgtgacaatcaaggctggattgtatgaagcattgcatatccacctttgccctcctttgaatcactcactctgggggaagctacctgccatgtcataaggaccctcaagcacccctgtgtagaagtccacgtggtgaggaactgtggtgtcctgcccacagccagcaccagctcaccacccatatgagtgaggcttcttgaagctgacctttcagctccagttcagtgtttagatggctgcagccctagccagcatcttcactgtaacttcatggagaccccaagccagaatcacccagacaagcaactgcttcagaattcctgacccagagaaactgtatataataagtgtttcttgttttaagctgctaattttttacatagcaatagaccacaatacaccatctaacatattattttatgtatttgtcttccttttgcataactgcgtcaactagaacataaatttccaggagggcaggaatttcttttcctttttgttcactgtggaatctcaagcaccttgcacaattttttaacagcaccccctcagataggtactgttattcccattatacagatgaggaaactgggacacagtaaggttaaataacatgtccacgattgtgtagtcagagccagacttttctccacagtctaatgggcttaaccagagtcctgtattgacccacttctatgcatcccttccagtgttatgttcaagacagaaggatagttattattgagagtagttagatctcagacatggtctctgctgtcgtggcgttaacaatcatttgggaaaacaggatgcatatcagatagccgctatataaagaaggatctaatgagtgctatgtaaacatgtataggccatcagagggtaacacatttccttttccaaagaagaatgactacccatagttcttatgatttgtgccatattatttttaaaaccctagacacaactaattggaataaggataatttccttagtcaaaagctggctactctaggctaggcatcagcccaatatggggcctagtatatgaacgctaagcctatttgactgttgagatagtatcctcagttttcttattggccatgtatctgtacaataaatctatcatctggtagcctgagcatgtctttagtccttgttgccagaaaaggtctctcatgcataatgcagtttaaaagtcctacagatgttcaaaggagtcacaggttagaggaagataaggctgagacacttcatggagaattgacacatgagctgccactgaaataagaatataccttaatcagtgttttagagatcatatcttcagatcgttttaatttataaagtataagaactacatgttttcacagcatgccaggagcaaaagatgaaaaaaagaactataagtgcttgacttgagtgttgattatatttttgtggacttattagacattttattttatataaatggtgtttcaaaaattaattcatttttatatattgtcgagttatttgttataagtagaaaacactatctgtagttttgactagaaataatacaaaagtgcatttctgaacctgtggttcaataattgccaatgatttataaaagtgtttcaggtgtcattcagtgtggtaatgcagttccatttcacttttttaaaattccataaggtaaaagaaaaagagcaataaaaggaaccagaagaaagtaaaaagggaaaaaagaagagaaagaataatcaaaatttgcaatttagagcctctgcccttttgactttcagtttgagttttattctggaaatgacttctgtgtcctctgtcatgtctctggcagcagagaggggaaggagggaagaaacctgcctttttatcctagttcactcattcaatgaatatttatggagaccttactaggtacctgtaactgtgctttttatcatatgccctctgcctggattttttttttctttttccttttatccgtggcaacttcctatttatccagtgagctgtagcttaaatattgcctactttttgaaatgctcacttattctacaaagttatactctccttctcctacatctcatagcattttacctatcctaccttcggaatatctgtttgtctgtccgactcttccatcagactgaccacttcaagtgtagaagacttttactctttttctcatcaccccttaacactaagcattatacctaacacataggagttgctcagcaaatgtctgatatggatgatgggtagatgggtgaccaactgttgacaacttgttgaaaagtataaaagatggaattttgcatctggctatcatggagtaggagactaacactcccattaagaacaactagaaaatctagattaaattccataagaatcgtatttgctggcatcagagagctgctaaggcagtttgctgaggtgagcccaacagtctgtgtattacttttctccttaggagagctggtaaaatcttaaatagctaaaagcagagcagagtttttggcaatctcatagtgttgaggaaagaaaaaacatgagtcttagctcaccaaagaggaggtggctctagttaatatccaggctttcaactggcaatccctacggatcaaaagtctacaaagtctagaacacctcttcacatagactcagtccctgctgatcagaatcctttctaaaggaagataacatcatttagagttactacaatttttcatacacagtgtttggcatttgatagaaaactaccagacagaacaaaaaaaaaaaacaggcctaagggggtgtgagggtgcagggtaggagagtagagaacagactaataactgacctagaaattagagttttcagaaatggacttcaaaataactacgataagttaaagaatataaatactaagattgagaattttaaaatataatcaaattgaaattttaaaaatataatcaagttgaaattctataactgaaaaatcactgacattataaactcaatagatggggtttaacagcatgaaaaactgaagtaggctgggcacagtgactcacgcctgtaatcccagcactttgggaggccaaggtaggaggattgcttgagaccaagagttcaagaccagcctgggcaatatagtgacacccctgtctctacaaaaaaaaaaatcaaacaaattagccatcctgtctactcaggaggctgaggtgggaggatcacctgagcccaggagttcaaggctgcaatgagctatgaccatgccattgtaccccagcctgggtgacagagagagatcttgtcttaaaaaaaaaaaaattggagttacccttaccccagttaagttacaacttaagagtgcattaataaaccaggaagaatgagattatattatggagagtattaacagtattgaaaagagcaaaaggatatacaggacatggtaaaaagtctaacatagatgtaattttggtcccagaaagggaagagagagagaatggagcaaaagtagcatctgaaatgataatggccaagaacttttcaaaagtgaccaatgaaaataagccacagattcagaaagtgcattgaattcttagcaggatttaaaaacactaaaacaacagcatgccactgtaaaactgctaaaaaccgaagacaaagaaaatcttgaaagcagcaagaagggggaaaagcacattactgtccaaaaagcaacagtgagactgacagttaacttctcagtagaaatgatggaagcccaagcaacaaaactatagtgattcattgcttaattaacaacagggatacattttgagaaatgcaatttttcattaggcaattttgtcattgtgcaaacatcgtagagtgtacttacacaaacctagatggtatgcctactacacacctaggccacgtgctggagcctattgctctgcagtaacttgcggaacctgtatggcatgttgctatactgaatactgtaggcaattgtagcacaacataagtatttgtgtttctaaacatagcaaaagcacagtaaaaataatggtattataacctcatgggaaccctgccatatatagtctatcattgaccaagatgtcattatatggtgcatgactatgtacatcttaaatgaaagataagctgccattctacaattctgtatttgcaaagatagccatcaaacatgaagacagtataaagaccttttttctttttctttttttttttttgagacggagtctcactctgttgtcaggctggagtgcagtggtgcaatcttggctcactgcaacctccgcctcctgggttcaagtgattctcctgcctcaggctccccaatagctgggattacaggcacccgccaccacacccagctaattttttgtattttttagtagagacaggttttcaccatgttggccaggctggtctcaaattcctgacctcaggtgatccacccacctcggtgctgggattacaggcgtgagccactgtgcctggtggagacatttatagagtatcaagaactgagggagtttccagtagacctgcacttaaagaaacaccaaagagatttctttaggcaaatggaaaattatcccagtcagtaatacagaaatgcgagaaggaatgaagagcaacagagagggtaaatatgtatttaaatctaaaagaacaccggccaggcaaaacagtaataaaacaataagataaaggaaaggaagccaatgaaattaaaatattgtatgtttctaggactgcctaggaagtggtaaaagtactgatttatttgaggtattaataaatcaaggtcacatattataattttcagggtagctactacagaaaaaaaattaaagaatatataattaacaagctaaaagaaaaaggatcaaatataaaatgtttaatacaaaaaagacaataaatgagaaaaaaggaacataaaataagtaggacaaatgaaaaacaaatattaagatggtagatataaactccaattcatcgtaactacattaagtattactggaaatacttcaattaaaagacaaaggtgatcaagctggatttaaaaaaaaactacttgctgcttgcaagaattataactacttagaaaaagtgtttggcagtatctgtgaaagctgggcacatgcatactcgatggccccagcaatctacttctacaaaggtactcacaagaagtatgcatagaatgtttaaagcagcattacaatggccacaaactagaaactacccaaatattcatcaacagaagaatgaataagttcttagataagtcttaaataaaatgatttttaaagtaacatttatcaaaagaagccagacacaaaagagtacacaatgtatgattccataactataaagttcaaaaacaggcaaaactaatcgatggtgttagaagttaggttagagatgacctttggaagggatggtgagcaaaaggggttaatgttctgttcctcattcctctgataattatatgggtatgtttactttataaaaaattcaccaaaaaataaaagaaaaaagaaaaaaattcaccaacctgtatatttatgacttgtgcattgcatgtatgttttatttgaataaaaagtttagtttttaaaaagtgtatcaggaaaggtattagaattggcagcaaggtcaattcagttatattttagtatgtaagaaacttggccgggcgcagtggctcatgcctgtaatcccagcactttgggaggccaaggtggcccaatcaccagaggtcaggagttcaagaccagcctaaccaacatggtgaaaccctgtctctactaaaaatacaaaaattagctgggtgtggtggcgggagcctgtaatcccagctattggggaggctgaggcaggagaatcacttgaacccaggaggcagaggttgcattgagctgagatcgcgccactgccctccagcctgggcgacagagtgagactctgtctcaaaaaaaaaaaaaaaaaaagaaaaagacaacatgcttcaagaaggaaaggttgaacccacagggaaagggagtgtttgaagatgctgaagagatgataaattaagctacttaaggacaaataagaggattcattcattcagctgaatattttaagtccctattataatccaagagctatctgaggtgttaggaatccaaaaattaataaggcttagtccctatttttagagtggtcactgtccaggagcaaaagatgccaatgatgatgtctgtaaaaactacatatttttaatactttccttgtacgagacactgtgctgtgcaggtttgcagtatcttacctgatatttacaacaatccaatgaggtagatgttatctcccttttcctgatgaaacacaggaaataatataagttttccaaggtctcaccaccaagataaaaacataagtctgtctgacgttaaagccgtgttcctgctggtactttacactgccattggatggtgtgtggttacatgcaacagtcacaatcaattctagtggggatgtcttggagaaggtggtatagatggcctgagcctcaaaggatgagcagacagagaataatgtttgatggcctggaagtggatttgaaggaagaagagtcttttctctgaataaaggccagattttcaaagaaggtggcagaaatgtataatgaacctgagacgactgagtgctgtttctcagggaaaggatctacctgctccatatacagactttcaaccaagtgtcttgttttcagaccttcctcctacaaagctgtctggcgtctccaattcctgactctgttctggacttctttgctttgtaaatgttggtatcatgtaattttatagccagattgttttaatgtttcataatgaacattttcccaaagcaaactgcttgttgcaaaacaaccgtatctttaagccagcattgtgggagagttctagattcctgccagagttaaacccaaggtagtcatatgtgtaattcaagtgctcataaaacagctggaaggaaaaaaaatttggatataaaataaattataggtggggcacagtggctctcacttgtaatcccagcacttcggaagcccaaggtgggagaattgctgagcccaggagttccagagcagcctgggcaacatagcaagaccttgtctctacaaaaaaattaaaaaattagccgggtgtagtgttgtgtacctgtaatcccagctactcaggaggcggaggcacaagaatcacttgagcctgggaggcggaggttgcagtgagccaaggtcatgccactgcactctagcctgggtgacagagtaagactctgtctcaaaaaaaaaaaaaaaaaaaagtctgtacggatacagggagcacactgcttccttttaaaggcaagaccgctatgttgaacattccacttctgctaaaccctaattatccagaagttataagactgcgaagcaatctagcttggtggccatgtgctctgtgctatataagaagctgaggtcagtactggggacaaccaatgctctctgccatattctgagcttagtaaacttgagagtgttgaattaatttagattaatgtagctgattggtaaattctgatctttgtggtagggcttgcttctacttgtttatattaaaaaggtaatgcagaacttaggcctggcgtggtggctcacacctgttattccagcagtttaagagaccaaggcgggtggatcgcttgtgcttaggagtttgagaccagcctgggcaacgtggcgaaaccttgtctctacaaaaaatacaaaagttagccgggcatggtggcacatacctgcagtcccagctacacggaacgctgaggtgggaggatcccttgagcccaggaggcagaggctgcagtgagctgagatcgcgccactgcactccagccaggacgacagtacaagatcttgtctcaaaaaaaaaaaaaaaaaaaaaaaaaaagcagaacttaaaacataaaattgctacatatttatatagatgaaatcactaagatttttacctatatacaaacctaacagaatatggacgcttactgctttgtacttctttattcactggaattaagtaaaattctctttccattttggccagtgaaatcaactcttgcagggttacttttgcttttaatactaaccaattaaattctagagcctaggcttaaaaatgcaaatctttataataaaaagagactaagatagaggtgaaggagatgtccctttagagcagtagaggaagagttatggttctatttcattgaactacctcaaataatctactttgatgaggtgttaaattaagaacattcataagaacatcaatcttgttttcctgtgcaatatgaaaacttgtgtgaatatttataggctagcaacttgtttttcttttctctgttcttggaggtataatttgaacaacagggccttgtaaaagtcttaagacttttgaaattgttaaatactgcaaagataaccttcaaagagaagtgtgtaatcctgattggctgtcttctagatagtttgttgccttggtgataacactaatttacatgtctgaattcctaaacaacctaaaaacttgtatctttgctctgtaaagtcagaagagaatcattggcacatttctcttttcccgtatgaataatggagagaaacaaattcctgttacactggttgatttcttattttaataaagatttaacaaaggaaattgcctttgtgtgtgtgtgaaaatttagtatctaatatccttatctttgggaattcatgtaattctttttctcaagttatttaacagtgttcttcttttttctacatagactgtccttcatctacttggattcagttccaagacagttgttacatttttctccaagaagccatcaaagtagaaagcatagaggatgtcagaaatcagtgtactgaccatggtaaaaggcttattcttttctgtttgttttttcacaaattagtgaacagtgttcattaatttctttaaaaattgattttgtcacatctgacttttaactgggtcctgagatttaatgtacaacttttatttgacaacacacaagctacaggcagtggaattgggtatatatttaatcctggagttggaagacagttgttggacaatattgtccaaagcagggtctatttaacatgcatatcctgtgccaggcactgtgcttaagcacctcatatactttacctggctttatcataacaaacctatcaagtagtgtattattatcattttattgagagatgaaattaacttcagttatttgttcaagcttacacaggaaataattgacaaagccaggattttaacccagatctgttggattttaggcttagagttcttaatcacttagttattctgcctggaaagtgctgaagtcagattacataggaccatgaagtaagactgtagtaaagaagagtacattaaggaaaaattataaaaaggctatttgctagaccatacactcagtgttctctaggaaatagatttataacatcacattgtaaaatatttgaagtgtctttttttttttttttgagacagggtcttgctgtgtcccccaggcttgagtgcagtggcatgatcatagctcactacagccttgaactcctgggttcaagtgatcctcccatgtcagccccctgaatagacaggactacaggcgtgcgctagctattttatctgtttgtttgtagagacagggtttcactatgttgcccaggctggtctgaaactcttggcctcaagtgatcctctcaccttggccttccaaggtgctgggattacaggtgtgagccactgcatccagccaaaaaaatgtctttttttttttttttttttttttttgtgagatggagtctcgctctgtcgcctaggctggagtgcagtggcgtgatctcggctcactgcaagctgcgcctcccgggttcacgccattctcctgcctcagcctcccgagtagctgggattaccagcgcccaccaataggcccggctaattttttgtgtttttagtagagacggggtttcactgttggccaggatggtctcgtctcctgaccttgtgatcaggatcaagtgattctcctgcctcagcctcccgagtagctgagattacaggggtgcatcaccacacctggctaattttttgtatttttagtagaaacaaggtttcaccacgttaaccaggctggtgccgaactcctgaggtcaggcaatccacctgcctcagcctcccaaagtgctgggattacaggtgtgagccaccatgcccagcctaaaggtgctttttattactgttatattcttcaacaataacatttggaagaatgtatcaaattgtactagggataccttaatcaaaatcatatacatttattatagaaggaataaatgtaaacaccaaagttattaatcttattaaagcgccacatagtacttaatacatatatgttgtttccctttgaaaaagtcttacatgaacattggctctgtgaaaacaagacgaaatttccaacatgccaatatggttttatttcaaggcagttgaaataaaataatagcaattttgctggtcttagaatatttttaaaacaagttttcccctgcaactattttctttcctttcttcctttttcttcttcctcttttctttctttctctctcttttcatttgttctttctttctttcccttttttttttttaatggagtctcagtctgttgcccaggctggagtgcagtggtgtgatctcagctcattgcaacctctacctcctgggttcaagcaattctcctgcctcagcctcctgagtagctgggattacaggtgggtgccaccagacccaactaattttattttattttatttttttttggtagggacaggatttcgtcatgttggccaggctggtctcaaactcctgacctcaggtgatccacccgcctcagcctcccaaagtgctgggattacaggcatgagccaccacgcccagcccctacaactattttccatcccttaaaaaaaattatgtaaagtatactgagacataaacataatttcaatgacataaatcatattagaggctgagagccaagacatgtccctgtaaccttattagcttgtatgaactgtaagatcaaagtttattgtccagctctaatatatatagaaagttaagcaactatttattatttttatgtacctagtgattttcactgattctggaatatgctgactttttttctctttaaaataatttcaggagcggacatgataagcatacataatgaagaagaaaatgcttttatactggatactttgaaaaagcaatggaaaggcccagatgatatcctactaggcatgttttatgacacagatggtaagtgatatttacctcgtgggacgtgactttgttgttctttttttaatgtagcaaaactgatggcttttcaattctctggttcaagttgatgattcctgtggcctccaggtgttaaattttcagtgtgcacctatgatcataccacagcttgtatctgcatagctcaatgagttacacagatgaaagccacagttgattcttgtctggattaaaatgtggctctaaggctcagtatttttgtaatatagcatgatcataaaggtaagtattagtgtctgcaactaataggctaaggatagactaaattatcacggttctattatataaacatatttatcattactgtagacaaagtacatatgtacaaatataaaagtacatatgtaaacattttcaaatgaaatgaaattactaaggttactattaatatttaactatttttcttgacttttttcccatgagaatattatacatgtatatatttttgcgaaaattggatcatcttcagaaacctcttaaatcgatagcttttgatgatttggctgtacacaggatatattcctccttctaattttaatcctacaatcagaagtttagaccagacataccttagtaactttccacctttaatcctacaccctttttggcttgaactccttttaaaactgtcataatgttgaaaatattccttaattgacagatgcgagtttcaagtggtttgataattcaaatatgacatttgataagtggacagaccaagatgatgatgaggatttagttgacacctgtgcttttctgcacatcaagacaggtgaatggaaaaaaggaaattgtgaagtttcttctgtggaaggaacactatgcaaaacagctagtaagtatgaccgaaggtgtttttccattctagaaggggcagagaaagtaggactggttttaaaataattttgagataagtgtgcctcaataaatagaataaggctaggcacagtggctcacgcctgcaatcccagcattatggtaaactgaggcactggattgcttgagcgcaggagttgaagaccagcttgagcaacatggcgaaaactcatctctacaaaaaatacaaaaatcagctgggcatggtggcgtgcacctgcggtccgaaatacatgggagcctgaggtgggaggatcaattgagcctgggaggttgaggctgcagtaagcctgggcaacagagcaacactctgtctcaaaaagaaaaaaaaaaatagagggaataagacttcagaatatattaataggatggtttgctcttaagtctcttggaactcaaattgtaattctcttacatttaggaggtaaggccagatcacatgaaataggcatacttttattctgtctgcttagtgtttccaagaggtcaaaaatttcttgttcagaggaattattataatctctttgcatgtgatttgagtgagcagaagtggtgaagagtaatcatgtataattccagaattctcgtgttactttacaaggaattagattctccataagaacatcctttgtttaggcaaacaaaaactacatcatagtttataatttatttggaattaaaatgttttcttctgacccgtcagaaggttttttttttttttttttttttttttgcgatgcagtctctctctgtcgcccaggctggagtgcggtggcgcgatcttggctcactgcaacctctgcctcctggcttcaagcgattctcctgcctcagcctcccaagtagctgggactacaggcacccgccaccatgcccggctaatttttgtattttttagtagagatggggtttcaccatattggccaggctggtctcgaactcctgaccttgtgatctgcccacctcagcctcccaaagtgttaggattacagacgtgagccactgtgcccggcccagaaggttttttaatgaacagaagttatcctggcccacaacagtattttgatgttatttgttaaaacactacacagtttgttattctaagttttagaaagtaactgttttctcattaaagaaaattaaattttcaaaatgtgggctgggtacagtggctcatgcttgtaatcccagcactttttgaggctgaggcagcctgggtcaacatagcaagaccaccatctctacaaaaaaagtttttagtttttttaatgtttcaaaatatgaatttagggtgcttaaaacatgatataaacaaccatttccccattttgcatcctcagtattttccccttctacttcaactgtaaaccaaaactccacatcctgctttatttcctttctttacatatggaagtatgtacatttctttacttgctacagcaggatccttgactactgttagttttacagtgattatcaaaatgttcgtcatagttttatggtagcagtattcaacttcaaatatttgttttttaaaaaattggttcttttcaggttctgcacctcagggtgccattacataaacaaagtttttaattaaactataacttcaaaacatcagaaatagtgagtacatccatactaaggtagttagggtcacagttgtttaattttatgacatttgttttctagactctccaaccagaatcctcttttttcctttacctcattattgtcttttcctcaagatcccgtattcttttccaccaaccaagctaatgcatgttgttagccctctacatctttctttaaaaactaagttcaaaatagacaacagagacaactaatgaggcaaagaaatatggattttaggctatgaatatattgatattaagctactaataaaagggtttatttttaatgattgtgaacatgtttaaagtcaatcctataataaagcataattaaattctaatttttattttcttttgtattttagtcccatacaaaaggaaatatttatcaggtaagtaatgatttggtctttaaatttttcccacaattaaaaatatatcaaaattctggcatattaaaatacattacagatccctttttaaaattatgtaatataaagtagaacaatttttataagaatgtagaaaggtctcttagtaataagactcaacattttaaatatattctacaatatgtagttttgtctggcttcttttactcgggaatatttttttagattcatctgtgttgtgcacattcactgaattttttccctaagtgtcataatactttataaatatatcatatattgtccattctcttgtttatggatatttggatcacttctagttttaaactaatttgaatagaactgcctatgaacattctcccacatcttcttttggacctatgttctcattttctttgagtatattctagaaagtagaaagctgggtcatagggcaagtatatatatttagatttattagaaaccaccaaataatttttcaaaatgcttgaatcatgttactactggcagtgcgtccaagttccatttgctccatgttcatcccatgatggtattgtcaatttatttttagccattcagatcaggtgtgtagtgatcttcttgtggctttaattttcatttacctgataatgatgttgagcacctttcagatgattatttatttgtatatcttttgtgaaaaggcttttacccatttgcggagtgcagtggtgtgagcttgactcaccgcagtcttgacctcctgggctcaagcgatacttccacctcagcctcccaagtagctgggactacaggtgtgggccgccatgcccagctaactttttttgtacagatggagtttcaccatgttacccaggctagtctcaaactcctgggttcaaaggatccacccgcctcagcctcccaaagtgctgagattacaggcgttgggccgccatgcccagccacccatattttttttgagttgcctatatttttggtaggaatttttaaaacaaattttgtttctttaaatttggatatgggccgggctaaataatacaaaacttagccgggcacggtggcgggcgcctgtaatcccggctacttgggaggttgaggcagggagaattgcatgaatttgggaggcggaggttgcagtgagccgagatcacgccactgccctccagcctcggcgacagagtgactccatctcacaaaaaaaaaaaaaaaaaaaaaaaaattggatgtgagtcctttgccagttttctatttgggggttactacgatagaactatgacagaggaggagaaaagaagtgttgggtttgtgtgtatacaggaattacatcctcattaatctataggaagaagacaataaataacaagcattagtgtggatatgcagcaattggaactcttgtggtaggaatgtaaaatggtgcagcctctgtgaaaaacagtgtggtggttcttcaaaaaaaattattaaaagaattaccgtatgatccagcaattctgagtatgtatcccaaataactgaaagcaaggactctttaatatccgtacacccatctgtttgatatttgtgtatctatgttcatagcatcatttgccatagccaaaaggtggaagcaacccaagtgtccactgatgaagggataaacaaaatgtaatctgcacatacaactgagtatcatttagccttaaaagagaagaaaattctgacacgtgctacaacatgcataaacctgaaggacattaggctaaacaaaataagccaggcacaggccgggcgcagtggctcacgcctgtaatcccagcactttgggaggctgagaccggtggatcacctgaggtcaggagtttgagaccagcctggccaacatggcgaaatcccgactctactttaaaaaaaaaaaaaaaaaagttgaaacccggaggcagaggctgcagtgagccgggatcactccactgcactccagcctgggcgagacagagcaagcctccatctaaaacaaaacaaaacaaaaccaccacaaaaaaaaaagaaaaataagccagtcataaaaggccaaattctgtataattcttacctatagtatgaggtacctaaagtagtcaacctcaccaagaaactctttgccaagggttaggtcaggaagaaatgggagtttaataggtacagtttccattttacaaaatgagttgttctgtgaatggatggtggtgatgtagcacaacgaagtgaatgtacttaatgctactgcacacctaagatggtatttgttacatgtatttctttaaattacatttttaaaaaatcaagcagcggaagcatgttatttagacatggagacagataaatagctgaagcaacagtagtagttaactttaaggaatggatgttcaggtgagtagtggagcaggagcacagtattttcactacgtatcttctagaactatgacttttaagctacgtaaatgtattactttggaaaaaataaagatacacataagttggaacatttagaaaaaaataggtctgtggcttcaaaaacgaatagttgaaagatctggcaacatatggtcttcagactacaagaaaagtaatctctgaattcattacatgtatgcatgtatatatgtgcatgtaaatctgtattaaatatgtgtatgtaatttagtgagtaaacactatgtgtcaggctttctcctaaagttagacattgaagacagagcaatgaacaaaacaaaagcctctgctctcaagcatacattctagtgggaagggtaaaacaaaactatgtgagatggtgacacatcctatagggaaaacaggcagataaggatgaattccagtgcaagaagggaggtgttgcactttatttttatttttagtacagtggccagggaaggcctcatttaataaggccatgattttgcataatgaagacctaaagtcaaagtgaaagcctgtcatgtagatagggattaggcttagtctgactttaaggagtaaaacagtagagaacatggagttgaagcagcaaggaaacaacccaacagttaagtgtagctgccatcttggcaaacagggagttccccttcataccaagggtaagctggaagactcccttgggaagaatactttcaacagaattaaggtgtccatagtcggatgcacctagtgtggcaagcacacaggaaaggtcaagttagtccaagctgggttcagcaaaggttactggagaggatgcaggagttaaatcttcaaggataagtagacatcaggcaggagacagaggacaggttatctgaggtgacaaatcaggaccaaggtgaagggttgaatttttgctgtcacttactaaatggacttgggcaagtcatttaaaccctgtgcctcagaattaaatgcacagttggcactctcacctgaggctacagcctaacaaaatgtttcatatagtttttgaggtggattatgtatagttcgggcctcagatgatcagtgttagaactagagcgttaaggtagcagtcagatagataaataggaaacagaagaaaaatgtgtagtcttcacaatttatagagaggaagtctataaatttccagattggttgactggacagtggctatttatttgcaggaattcaggttagaagaaatttggaagtagggctacacacacatatttatctatggatttacataaaagacttgaatggttgagatcaaccatggaaagctttgagtccacaaagatgactaggaagcagtcgtctgaaaaatagagcagtcagggaagccaagtgagtaggagataacttcaaggctggacggctaacaatctagttgccccaggatgaactaaaacatccacgtgtttaagcatgtagtcataaagagatcattggtgacctctgccacagaaatttctgaagaaatgttgagaaaatggattaaatgggcttaagaaatgaaaaagtgagcttgtttcagtgtttgctgtttcctcaagtaaggaacattgttaggctaaaaagtatttttcctaaattttgtttctttaaaaaaaacaggatttcatggtaaatagctattatatgctgtcaagcaagcaatggacctttcctttaattaatgaggtagataatacatttcctaatgtaaaactatcctaacctccagatataaactacacattgttttaatacactgcttatcagttgccttgacaattgactttgtcacacattttagtagtatgcagctagctaactaaaacccctggaggcaactttggctaaaggtcacttgcagaatgtgaaaagcagcatatatacttactgtgtctcgcccatcttggacactgtccagttcttaggatacccggtcttttaaagctattatgattgagtctgtaaatatttctcaattactatgatctttcagacttttctatattactatcatgtaattcctatttaaagtagatgctaccgattatgaagccattattgtacaatcattagtacactgaaataaagtgtgttcacactggtaaagttgaggttctacactgaaaatggactatgttaattctaataaaactaactacggggctgggcacggtggcccacacctgtaatcccagcactctgggaggccgaggggggcagatcacttgaagccaggggtttcggaccaacctgggcaacatggcaaaactgtctctactaaaaatacaaaaattagctggacatcatggcgtgcgcctgtcatctcagctacccaggctgacacatgagaatccctggcacccagaaggcggaggttgccgtagccaaaaactatggaagaaccccatttgaactcagtttacggaattcttggctttttttcattttaatgtctttaataataccaccaccaaatccaccctcacaccttaccaaatctttactaccaaattttatttcagaattaaaaagatagttcacttggggccatttcctcactcctcccaaaaaatcctgtcaatatttgaaaagtatcaatggctctccctcactttaacaaataatttggccaaatttctctcactaatcttaaattcttccaggtctcattttaacaagcaccagttgaaataatgggtattatgaatatatttaataataaaaaatctgtcaaaataattctgaaaagttttcacattctttagagtcgattactatacataatacaagtacctgcccaaaagtatgtttgttctcctaaaccaggttattttcctcaatttattaaactggattcttatagaaagattacaagggtttgaataggcaagaactgcaaagttgtgcatacttacagaaatttagggaaacacacaaagaatgaatgaatgcaaagacacacaaaaccaggtactttactgcaggtcttggtgtttttttcagttaaacaaatcttaaatccccaaagccaggtgaaccattaaacctcaataatgtaacacattatctaaatactagaattcctaaagggaacagtaggtctgaatttgtagtcttagatcagaaagtaaagcgaaggaagacaaactggagcatggtatatacttgcgtgatttccactatggggtcttcagtagagtggagaagtgcacaacttcctagaaaatttgagtactattcttcaggctaagaaatataaatcttgttagtaacaaatgcgaaatttttggttttctcatcagtgtgggaaattctcaacacagagaaatgtttacacaaaactacagttgtgctcatcaaaatatacttgcaacttgtgtaccctaatttcccaaatactcttttgtcttttccttttcagataaccacattttaatatcagcattggtgattgctagcacggtaattttgacagttttgggagcaatcatttggttcctgtacaaaaaacattctgattctcgtttcaccacagttttttcaaccgcaccccaatcaccttataatgaagactgtgttttggtagttggagaagaaaatgaatatcctgttcaatttgactaa

SEQ ID NO: 4 - DNA, 4416 bp, Homo sapiens
aggagacagaaagctagggagggagaggaggagaaggaggtggggcccggctcctcgtcccctcttcctccgcccaccacgcctcccctccccccggacgtgtaaatgagactctgcaaactggaaagcagcgaaaggacacctccttccttttctctcttgttgtttttaagtggaatgagagagagaggagtggagagggaaaagaagagagagagggagaagagagagaggagagaaagagcgagagagcgagagagagagacagagacagagagagagagagagagagagagagagagaaagagagagagagagagagagaataagctggggtaaagtattttcgcagtttctgcctttaggattttattagcttctctcccccaggccgcagccaatcagcgcgcgtgcccgggcccctgcgtctcttgcgtcaagacggccgtgctgagcgaatgcaggcgacttgcgagctgggagcgatttaaaacgctttggattcccccggcctgggtggggagagcgagctgggtgccccctagattccccgcccccgcacctcatgagccgaccctcggctccatggagcccggcaattatgccaccttggatggagccaaggatatcgaaggcttgctgggagcgggaggggggcggaatctggtcgcccactcccctctgaccagccacccagcggcgcctacgctgatgcctgctgtcaactatgcccccttggatctgccaggctcggcggagccgccaaagcaatgccacccatgccctggggtgccccaggggacgtccccagctcccgtgccttatggttactttggaggcgggtactactcctgccgagtgtcccggagctcgctgaaaccctgtgcccaggcagccaccctggccgcgtaccccgcggagactcccacggccggggaagagtaccccagccgccccactgagtttgccttctatccgggatatccgggaacctaccagcctatggccagttacctggacgtgtctgtggtgcagactctgggtgctcctggagaaccgcgacatgactccctgttgcctgtggacagttaccagtcttgggctctcgctggtggctggaacagccagatgtgttgccagggagaacagaacccaccaggtcccttttggaaggcagcatttgcaggtacctctattaccctgggtccccttgtctctgagcctggggttgtgggtcccaatggcatttccctgggaggaggaggagggagacttggagctggtgaggatgagcttggtgctcctcccttggttattaggactctgaaggaggtctgagtagctggagggcctggatggaggtcagtgtgaggggcctgagctgggtgctatctgaagcctgaaggccacctcacttctccaggaggccctgggaccagcctttcaacatgtctgagaggtttagatctctttgctgttgagtggggatcagggtgtccctacccagcacaattccaaactaattctacacaaaagctaaataactctcaattcggtgcgtggggagtgggtgtgggagatgggtaaaaaggtattggatgtactgtagagaatacaacctctcactttctattagatgagttttccaatttccaaagaaaaatttaggtttcctgcagccgtgacatatgtgtgtgcactgggatgggttaatgtgtgtgtgtgtgtgtgtatgcgcatgtattgggagtgggggcagaaacgtgtttccagaatttgcctgtagaatctaaaagagtggccaagagtctggaaatgcatgaagactggacgtatgtgatggtgggcaaaggcctgactgtgtgtggtgtgtgggtatgtttgcagattcgcgggtgtgagagcagtgatgggtgagggtggccttcaggagccaaggctgagcggtggtgagagaacaagccggaagccagggtgctgtcctggtatgctttggaggaacaggattgcacgtgcgcctgtagggtgacctgtgtgcacctgtgagatgacttagcttggggcttgcaaggcctgggtctgcatgggtgggtatctgaccatgccttttcctccctccctttcacgccgcgcagactccagcgggcagcaccctcctgacgcctgcgcctttcgtcgcggccgcaagaaacgcattccgtacagcaaggggcagttgcgggagctggagcgggagtatgcggctaacaagttcatcaccaaggacaagaggcgcaagatctcggcagccaccagcctctcggagcgccagattaccatctggtttcagaaccgccgggtcaaagagaagaaggttctcgccaaggtgaagaacagcgctaccccttaagagatctccttgcctgggtgggaggagcgaaagtgggggtgtcctggggagaccaggaacctgccaagcccaggctggggccaaggactctgctgagaggcccctagagacaacacccttcccaggccactggctgctggactgttcctcaggagcggcctgggtacccagtatgtgcagggagacggaaccccatgtgacagcccactccaccagggttcccaaagaacctggcccagtcataatcattcatcctgacagtggcaataatcacgataaccagtactagctgccatgatcgttagcctcatattttctatctagagctctgtagagcactttagaaaccgctttcatgaattgagctaattatgaataaatttggaaggcgatccctttgcagggaagctttctctcagacccccttccattacacctctcaccctggtaacagcaggaagactgaggagaggggaacgggcagattcgttgtgtggctgtgatgtccgtttagcatttttctcagctgacagctgggtaggtggacaattgtagaggctgtctcttcctccctccttgtccaccccatagggtgtacccactggtcttggaagcacccatccttaatacgatgatttttctgtcgtgtgaaaatgaagccagcaggctgcccctagtcagtccttccttccagagaaaaagagatttgagaaagtgcctgggtaattcaccattaatttcctcccccaaactctctgagtcttcccttaatatttctggtggttctgaccaaagcaggtcatggtttgttgagcatttgggatcccagtgaagtagatgtttgtagccttgcatacttagcccttcccaggcacaaacggagtggcagagtggtgccaaccctgttttcccagtccacgtagacagattcacagtgcggaattctggaagctggagacagacgggctctttgcagagccgggactctgagagggacatgagggcctctgcctctgtgttcattctctgatgtcctgtacctgggctcagtgcccggtgggactcatctcctggccgcgcagcaaagccagcgggttcgtgctggtccttcctgcaccttaggctgggggtggggggcctgccggcgcattctccacgattgagcgcacaggcctgaagtctggacaacccgcagaaccgaagctccgagcagcgggtcggtggcgagtagtggggtcggtggcgagcagttggtggtgggccgcggccgccactacctcgaggacatttccctcccggagccagctctcctagaaaccccgcggcggccgccgcagccaagtgtttatggcccgcggtcgggtgggatcctagccctgtctcctctcctgggaaggagtgagggtgggacgtgacttagacacctacaaatctatttaccaaagaggagcccgggactgagggaaaaggccaaagagtgtgagtgcatgcggactgggggttcaggggaagaggacgaggaggaggaagatgaggtcgatttcctgatttaaaaaatcgtccaagccccgtggtccagcttaaggtcctcggttacatgcgccgctcagagcaggtcactttctgccttccacgtcctccttcaaggaagccccatgtgggtagctttcaatatcgcaggttcttactcctctgcctctataagctcaaacccaccaacgatcgggcaagtaaaccccctccctcgccgacttcggaactggcgagagttcagcgcagatgggcctgtggggagggggcaagatagatgagggggagcggcatggtgcggggtgaccccttggagagaggaaaaaggccacaagaggggctgccaccgccactaacggagatggccctggtagagacctttgggggtctggaacctctggactccccatgctctaactcccacactctgctatcagaaacttaaacttgaggattttctctgtttttcactcgcaataaattcagagcaaacaaaa

SEQ ID NO: 5 - DNA, 12115 bp, Homo sapiens
gagggtgcgcccaccggtcccgccgggcgcccgcgggacgcgccgccagggccctctccgccgggggctcggcgctcgcccacctcttccaaatttaaccattacctaaatccgaagggaaatgagcaaacctctcggattgggtgtcaaggtattttcagcctcgttgggcgtatttatccccaagtgtttccacaacaagctatttcggggcctgcggggcaggtttcgctctgcggacgccgtggccactcgccgggctccaggccggcggcaccgcgggccggtgattcacggtcccgacccgggggtggtgcagccctaggaggcggcggggtcgggggtggggggggcgggtgaccgaggcctgaggggcggggagggtcctcggagcggggcgccccccacccctctctcgccagtcaatctgtgtcctcaatctgtggcttctctcgctgcggaagtctccctggagccaagaatagttcattttctttcaagtcatttctagtgcctaagtgtccggacctccaatttcccccatcccctgccgacccacagggagagaactgggaggactactaaggggcgcgcgggacgggctggaaaggccaggccccccaccgcctggccacttgcgcaaaggagcgcgcccggccgcccgacgggggttgggagcaggtctgggagggctatgcgagcgactcagtaacgctcaggaagtgaagcttgtggttttgggggctgagctcggaaggagaattttttttttttttaagtcagagagatagagcggtctctcccgaaagcaagattccgtttgaaaactctcctagcgcggtgcccgcgccgtgactccgcaggtaggtccgccgagcctgttctgcgcctcctgccctggtgggggcggccgcggggactcgcagagcactggcactgcgggggcgatcagagggcgcgggcggtttcccacctgctgcggaccgccgtgcgggagcccagagagctccggcagctgggttagggcgcgacccgcgcagtgtgactggaaatctggagctgggggcgcgcagcaggcggtctggtggttcggcaggggagccaaatccaccagggaaggaaacatctggtggggaggcggcggcagctgcgctcgggaggacgcccccttagcgccctcggctccctccttcctgggcccggacggtgaggagaggcctgagcgcgcggaggggccgccccacctcccgcgccagctgcagcgcggggttgccttcccacgcgctcggcccaggccccggggcccctatctcctccaaactctgtcgctccccacaggaaccagcaaagcgggccggggtgcgagagaggcgtgggcttacagcccgggtggggaggcggcctccgcgtccgcctggtctctggtggcgccagcccagacccagctccggcgctgacagttaccccgcccccatctgtcccgctcccagccaacgtgggtccaagctgcagcgggaccctcgggacaacgccactccgtttttcttttcttccgagtttcgtggctgtttaaagaattgggtttggggtttgtggcgtctaattgtacggacgagaagtgcaggaagcgacaaagctctagccctaggagccaccccggagggaggcggatggcactctcacccctaggggcattctggcgcttgggtagcgggaaacttcgcgggagccccgcgacacgtcccaggcgtcttttctcccaggtctattcccattcctccggagaaggggacacaatggggctggggatctggagcagggggcctgcaccctacagggaccaaggcctgtaggactcgtttgagctgagagcgccaacggacagacgtagactgtgtggcctgcatcttgcctaggaagccgaggggctcctagtccggcagtggaaacagcgcgaagccggaggactgcaggtcctgccccggcccagagttcccagcaccctcgtttctgaaccagccgaggccacggagaactgctgtactgcagctcacgtgtgaacccggtcaccatcgccttcaccccgggaggaaggcagattcgtttactccagaccacctcgactgtggggtaccgcccccggagccggctggagcctagcggcaggcgcagccacgccctcccgctgcgctcagatttcgacctggtattaggtgaactgattgggggttaatgagagcgacgccccgggcagctagttccctcccgggcccgggcccgacccccgctctctgctaatgcagcctgcgcgctctggcgtcctgtcttttttgtctgctaaattgtcggtgcactaccgactcgggacacctagcatttcccagtcaacgttcgtggatcgggctccacctccctaggacaagattttttggtgagcagaacggaaagtgcttttttcccgggacctgattcccgaggttaggtctccatggtctgggatggctcgccgcagcctcgaccggtgcccgccgcagccgggagtccaagggcaaagtttctcctacgtggggcactagtgaggggcgagtgggatcacccagatgcgagtttctcctggggcgggggttggtcgtctgttgttcccctcactttcctgtccctttgctctcccacctcctttctctggcctctgctgtccccaatccctctgctgctgtcctcccgccgccccacagttttatcttgtgttctgttcccccctccccccggtcctttcactccagttggtagctggctcttggaggtcttggctccttgccccttccgggtcctcgaccactgggcatccccggcccctaaaccgatccgcgtgtccccgccctccctcgccagccgtaaagcacagccaggcaggcgatgagtagctgagttggggtaacccacccgatgggaactacagctctccagggagtttgattgccggagcgagcttcgctaggaaaggggaggagctggggggcgtgggcagggaggaggaaaggggcctgagacagggccccgggacaggttttaccgctgagctgtgtcagtggcggcggcggcaacgacggcgggttcgcgccacctgtccaagtgccacctggtaagcgcggcgcagcagggtcaagcccctcctcccgtgggccctctgcgcgcctccctggcccgcgctctccctccgcctgggtgcccagtccgccgcaccggagagtactgacccacgtctccacctggttttctttccctctcaggtctcctccgggctggggctgagcaagccctcggagtgaccgtgggtgacagcggctccagggactcttggggcgcagtggggaaagtgccggaccaccatgccgcgctcatttctcgtcaaaagcaagaaggctcacagctaccaccagccgcgctccccaggaccagactattccctccgtttagagaatgtaccggcgcctagccgagcaggtgcgaggcgcgcgcgggccaggcggggctgctcccccggatgcctactgcacctcggcacaccattagtccggagctgggaggggctgccccaacgtcccttttgctgctgtttttgtttcctactgtcctggttcctccgggtttgtctcctaggtgccatggcctctctgcgcctgccctcggatccgagagggttcccggccggggtctgggtggagaggggaagacgctcggctgccctggtcgggggattgggggagccttcagcaccctcagactcaaccggtcccagcctgagcccctcacctgcctcctctttgcagacagcacttcaaatgcaggcggggcgaaggcggagccccgggaccgtttgtcccccgaatcgcagctgaccgaagccccagacagagcctccgcatccccagacagctgcgaaggcagcgtctgcgaacggagctcggagtttgaggacttctggaggcccccgtcaccctccgcgtctccaggtaggaacccactgggaacctcttgggcgggagctgcagggacccggcagtgctgggggggaattggcgcgaccttgggcgtagaaatgctaacggggagttggagagtctttccgggagaagggagctgattcgtaggggaaggaggcatccggcttctctgggacttggacagcttgcccgctggggctgctgcctccatcccaggcggcaggaccctagctgcttgtcgcttagattcgtttgcgcggagctggccagtgacggaaaacaaaccagtcgtttcgactggcggcaacgctgacctttcattttctgaccagacctgactgttttataaagtgctaggatcctgcaatctagacccccaaacctcaaacagagaacagggcagaacgggccaggcagaggagctaggcgctgggcggcagggagggggcaggacgaaaatctcagcccgcggcttggtcttcacaggcgcagattgggggcctgtttcatttttcgttttgccgggttaacctagcctcaggggcctgctctctgggtttcatttccagcgagcaatccagcttcaggcaaactaagtgaccacacgttgggtgggggcgtctcgagtcccggccgggggaaggaatgagcagaccagccggattctgtcaagggccggttatatccagaatatgtttgctagttttagaagataccaccacccgtcccacaatcagtgagttgacttggcgaaaaccatagctccagcaagtgtgtctgggagccggcggcgggaggattcttcctgccagggcgtcaagtggccagacaaggattgggcgcgccccgaacccctccgaacgaaactccgggtacagcctctcactgaagtggccagcctgaactggagtgttgtgcgcacacacacacacacacatttgtaaatgccgtatgcactcacatgcgttggggtcactagttttagcaaaattcacgtgggtgggggcgtagcaggccgagaattcagagctgtctccttgcaggtggtggctaaaccttatgagttatagttattctctgagaaattcaggttccccgcctccatcaaactgtaacaggaatggggagtatttggctgtcaatttaagcccaaaagcccctttcctgctgctcctttgctacgtacactgggcacttaacttcgtgaaatcttaataccttcgggtttattcagacagcagcctttcgggtagttcggggccgcatttatggaccttctccctccttcctcttggattctgggaagaaaaagaattgaatgggaacatgtaggggctgggagagtgcctgcgctggtggctggacccttccgcccttgagtgctgtgaggggccgaacggccgccaccttctccttcttaacagctcaactacgggcatttatagatgcgcccttccctgtaggatctccaggtgcgcgggtccagccagaaaagatcctcggaacgccgagcgcctccgctgcactcgcacagaatttacgacctcctctcccgaggtcttttcaatgatctgtttactgttctgcctcctatagtggcctgcgaggccccagggcccgggccacgttttaccctggggcgagcctggcacctggcgcacgcagtgttctacaagcgctgggtgccccgcagtccgcgaacacgccacgctcgcagccgcagcccggcggcctccgctctgccgtctgaagcctgaccggacgctccccttgtgcctccacagcctcggagaagtcaatgtgcccatcgctggacgaagcccagcccttccccctgcctttcaaaccgtactcatggagcggcctggcgggttctgacctgcggcacctggtgcagagctaccgaccgtgtggggccctggagcgtggcgctggcctgggcctcttctgcgaacccgccccggagcctggccacccggccgcgctgtacggcccgaagcgggctgccggcggcgcgggggccggggcgccagggagctgcagcgcaggggccggtgccaccgctggccctggcctagggctctacggcgacttcgggtctgcggcagccgggctgtatgagaggcccacggcagcggcgggcttgctgtaccccgagcgtggccacgggctgcacgcagacaagggcgctggcgtcaaggtggagtcggagctgctgtgcacccgcctgctgctgggcggcggctcctacaagtgcatcaagtgcagcaaggtgaggctcccgagctcaccacctcgcctgccgtgcgcccgcttcccctacccgcgcctcgcctgcgccccgcggcccctctcagcggccttctctctggccccacccgccttaggtgttctccacgccgcacgggctcgaggtgcacgtgcgcaggtcccacagcggtaccagaccctttgcctgcgagatgtgcggcaagaccttcgggcacgcggtgagcctggagcagcacaaagccgtgcactcgcaggtaagcgcggggcgcaccgccgcgcgcggccctgctcggggatcttctgcatctcctcggtgcagcaccagccactctctgcctggaagttttctcctcgacttcccccagtttcctcccccaagccctccgctgcgtccccttgccctggtgcaggtgtgtagggaaaggaggattgtggccggctcaggccttgaggcagccctggattttggtgtcacaccactgtgagcctcgagagtgtgatcctcattgttactttgggcttgaggtaggtttgtatgcactgattcgtgctgctgatatatcagacttactagctctgtttctttgtgcctattcttttcaccaaatggttgtcacttaatttgcattgacccctctcgactgaaaaggcaggaatctcagctcatttagagcatctagtagcatattcaccccgctattcattctttccttccttcctttcttttcttttcttttttcttttcttttctttcagagtctggctctgttgcccaggctggagggcagttgcacaatctcagctcactgcaacctccccctgtcaggttaaagtgattctcgtgcctcagcctcctaagtagctgggattacaggcgcatgccactacagcacagctaatttttgtgttcttagtagagacgggatttcgccacgttagccaggctggtcacgaactcctggcctcaagtgatccaccagcctgggcctcccaaagtgctgggattacaggcgtgagccaccatgccccaccgccgctatttattcattcattcattaataaatatttgttggctaacttccaggtgccaagtacttaagaatcttataacacatcaggtccttgacagcatgcccacatgaagattatagtttagctgagagatggagagtagatgagcaagtaaatatgccaatagctatctcaggagaatgcctacttacgaaggctaaaaagagtattagcccatctcccccagcacccacactggctggggggaggtggcatctcaagtgactgaggtctaagcctcctgttgaggagggtggagaagtgtgtgctaatgggtgtcaaaaaaagcagggtgtggatatgtatttgccatggggtgtggaaggttgtgggtgaagaatgttttggtagaaaaagtgttgaagggccaggcacggtggctcacgcctgtaatcccaatactttgagaggccgaggtgggcgaatcacttgaggccaggtgtttgagaccagcctgaccaacatggtgaaaccccatctctactaaaaatacaaaaattagtcaggtgtgatggcgtgtgcctgtagtccctgctacttgggaggctgagacacgagaattgcttgaacctgggaggtggagggtgcagtgaactgagatcgttccactgcactcaagcctgggcgacagaggagactgtctcaaaaaaagaaagaaaaagtgttcaagggattttagggtcagctgaggggtgaggagagcagcagtctagttgactgcagtaggagttctgcatctctctctctctctctctctctctctctctctctctgcaggaacggagctttgactgtaagatctgtgggaagagcttcaagaggtcatccacactgtccacacacctgcttatccactcagacactcggccctacccctgtcagtactgtggcaagaggttccaccagaagtcagacatgaagaaacacactttcatccacactggtgagctaaaaaggcccttggcttgtaggaaacaccctgaggccaacattactcatcttctctgatttctggccccagtgagtggtggatgaggcctttctgatggagttattctctgctctgtgttaaagaaaacaaaggggtgggttctttggttcatttaccggcataattctccccagagccaccttgatttggggttgtgtctgaaaggccactcagcaggtcagctcacaggtactctatacttggaaagaacattttcctttaggttagcagctgcttcccctgctgcctgctctgggtgaaatatgaagctccagggtcctcttagagagttgctctaaagcttacctagagattgaggactttccctaaccacctggccttttgtgggagggactcgtgtggactctccggctgcattttcaggagtctgagagcttattctgattgaagaggaacaaataatggcaaatatgattaaactctctgctaagcattttttaaatgcattatttcattttatgctcacaacaactctgagaggtagcgactactccttctccccattttagagatgaaaaaaatgaggctaggtaatctgcccagggtcacactgctagcaaatgacagggccagagctcaaattcaggtctgacctctcaaatgttcactcttgaccactgtttattgtattttatgttcagagtcatgaggttggtagacagaaagcttctgttcacttattgcccttttcaaaatatctgcaagttaatgccataataatgataattccttacctattataatgctttataatttacaaagtactttcaaatctatcatttcatttgattcttattgccactcaagaaagtagaaggagctgctcttaccatcctgaaactcagaaagagtgaatgatttatcagaagtaagactgaatgaataatgtagccatgtaatgctctggcttttaatcctggactgtttgtctaacactttatgtgcgggtgggagttttaatgccaagaacactctaatagtcaaaagacatttacatgagacccagaatttctgaaaattttattgcagaatatgaatactgatttagaacaaatcacagtgtattctaaacacccacccttgatgtttataaatatacttgggtaatgtatatatttccattgaaaacccagaaaagtattctactttaatcattccctcttacctgaaatttccatgtaattcactccttataagtaaggtattcaggacacttatcaaaatgcaactaggatcttgactgaataaaacattaagcccttatcaaacatttacgttatacctagaatttgttttctcagatttgtttgaccctaaagggatagaatacattttgatgggtggtttcttatcaaggaaatctgaagcatgaaaacagaaaagagtttttagcaaggaggacagagggttcctcaaaaacaaacttcatctattttatactttttccaaggctgagccctgactataatgccatgctgggctattggaaattcatgccatttacccaacaacacatgagatggggaacaagacaaaaccttcttgtgttctcttatttattaatttgtggtgaagaattgctggtatataaagaatcatgtgattaaccccataaaattaaggaaaaatcaagacagtaaagtatcagctgccttaatcctttgtggcccaaatgtggatttttaaaataagatattgaaaaacgtatcctgcacatgtaccccggaacttagaaagaaagagagagagagagagaaataaagaaagaaagaaagtccatgttaagatgttttttcagatataatctgctgtccttcaagaacaagaaagaagacgggctcactgatccatacaaactaacacccacttggaaattcagatttgaaaacttcctctgaattagaacggagtcacacggttttaggacagcttccccctccccttcctgttgaacatctgctctgagtgttcatggcttataaagtcaggggagtcctcccggggtagattcagctggggagggcacgtggcctttgctctgtttccgtttagcaggaaaccgtttgaggcctttggctgggaaccccccttcagaaagtctccctttcacctggtgcccccatggtgcttccagggactcgcattgcaggctgggagtcagttcaggttgcaacacgtcaccctccaagttgcttgaaggccttagactgtggtgcaaccagctgctgccaagagcatgtgggtcacagtgggtcccctctagctttatcatagactcatactttctcccctccccctcccatccccacaggtgagaagcctcacaagtgccaggtgtgcggcaaggcattcagccagagctccaacctcatcacccacagccgcaaacacacaggcttcaagcccttcggctgcgacctctgtgggaagggtttccagaggaaggtggacctccgaaggcaccgggagacgcagcatgggctcaaatgagcaccctggctggctgcaagcagcagctacacaacactacagagggcagcctccctgcttgccaccactctgctccctgcttgcctccactcccttctgactttccagaccccaggtccagtctgcagatcctaccaggttgctcctccttcgccttacctcctggagctgccagaagaaatgaggtaccttttcaaagtgcagccgagagtgagaaccaagtgactctctaggcttcggacacaaataggctcctctacacctgaagacaaaggcaaagtcaaatggggaccagaataaatcttagaccccacagtccttcccatttccagccctaatctacagacaggaatgcccttcaggtttcttccctcccccctcttgacctaccccagatatttgtgtggaagaggaggaatcaccatttacaaggtggacaaatgctaatatttttatctagaaagaagagtgagtgttaacttttatttttttccttctggggggtctgttgactcctttcttttgggtgctgcctataaatcttggaggaatcatttctcctcctcaaaaactgattcagaaactgacttggggaaggaatttaatactttgaagtcatgagatgcaccatcgaggctacccccaagaagaagcagaagagaagttggtaatgagaggggattagaggtcctcccttcagtagggctgtgaaaacctcatcactggaggtaaaagcacaagcaatgcctgtggacaagatgtcattcattcactcagcaaatgttcatggatcaccggctaccaaggtaccaggcaccatgctaggtattggggaagagagactgaagtcacaacccctgactgctcctcaaaagctaacggttgcacctccaagtggctgggtctgttcttactcttggagggaattctgagaagacagcacagaattgtaaaccttcccttttgacccttttggattttatcaggtgtaaacaaaaagctgaacagttacttcaaagatatgtgtgtatattcagttttttattgttaagctgatattttaaagatttctgagctagcaggcatgtgggaaggaaggctctgtcttcaactctttgaccctccatgtgtaccatagaggggggaaaggtggtattttcactttgatgaggttggtaaatgtttttagatcttctggtaagcattatgtttgttaatacatatttattagagtgatgttttaagttaataaagtattaagagtatt

SEQ ID NO: 6 - DNA, 33146 bp, Homo sapiens
ggagttgagcccaatctctcttccccactgcaagaccctggtgcagtggttcctatacctattgcgatggtcctgaagaaagtcttccttgacatgctttaacatgtgttattgaataacattttaacagttatggtgctgcaactcagataggaccagattcatccctggacgtagcttctccctaggacattaagtgagtgcctttgaagtctttgtcttccttcctgactgactcatcaggaagtcagactcccgaaccattgctccaaatatccgttgaagcaggtaaggacagactttgattcctttgttgttgttgttttttcttggtttgagacagggtctcactctatcacccaggctggagtgcggtggtgcaatcatagctcactgcagcctcaaactccagggctcaagcaatcctcccacctcagcctcctgagtagctgggactacaggcacaccaccgtgcctggctaattttttattttttgttttttgtagagatggggtctcactatgttatccaggctgatcttgaactctttggctcacgtgatcctcccaccttgacctcccaaagtgctgggattataggcatgagccgctatgcctggcacagactttttttttttgagatggagtcttgctctgtcacccaggctggagtgcggtggtgtgatctcggctcactgcaacctctgcctcccaggttcaagtgattctcctgcctcagcctcccgagtagctgggactgcaggcatgcaccgccccgcccggctaatttttgtattttaagtagagacggggtttcaccatgttggccaggctggtctcgaactcctgaccttgtgatccacccgcctcggcctcccaaagtgctggaattacaggcatgagccaccgctggcacagactttgattcttaaagtatgggtatatttgctgaagctgggttagagtcccaggtttcttttgaaaggtactttctgggctggaagtccttcttcctggccctctgtgaggcctccctattctctctgttctctctattggatcctgcttctcccacgggaaacttttctgtcacctgaaagctctcttctcgaactcctgctgactctatcctctgccaactgtgtaccccactgccaggcccttttcctctccactccagcccctcagtctcttgtaccttagaccccctacccttcactgggggctcttaaggaactcagcacctcattccgcaagcaagcacctgaagctgaaaataaaataacaacaacaaaaatagaactgtttgaaaactgagactgggtgtggtggctcatgcctgtaatcccagcactttgggaggctgaggcaggagacttctttgagctgaggagttttagatgagtctgggcaacatagcaagaccccatgtctataacaaacttaaaatatagccaggtttgaaggcacacacctgtggttccagctacttgggaggctgaggttggaagattacttgagtctgggaggtcgaggctgcagtgagctgtgactgcaccactgcactccggccggcctcagtaacagactgagaccttgtctcaaaaataaaaaataaaaaaagcaaaacaaagaaaaagaaaactggacaaatgaaaaaatcttaaaagttgccttcacagatattggtaaaaatttttagtccttactgggttggtaaccttaatttgtcccatttgtatcagaaacataattggatgtgaagataaaccagtgaatttatattatcctggtttactgcctcatgattcaaatttttaagatgaaaagctataagatctgtttacatctgtctgtatgtttatgtatgtgtatatgtatgtatgtatgcatgtttgtttgttatgtatacatgatatttttctaacttcaatgctaatacaaaacgaaaatagcaaattgtcttagggataaatgcgcactcaaacaaattaagtattcataaaattatcagaaaaataaaaaactgaacaatttttttcaagttcacatgatccaggatagtctttagtaaataaaagttagttttaaaattgttggtaaaatgaaaataggactgtcttcagaactgttatcattaaatacagacatacagtttttcctgagtatgctggtaagatacgtttgtgttgtatttgctagatgtttaaggtcataaagctataaatctaacctaagaacagaatgtacaagaaaaatgaattgcttaattgctttgtgcatgtcaggacataaaagttaaaaaaaaaaaagaaccttgtttaactttttagtttcattgcttttgtgatgtttttgatacttacctgatttattaataggaaaaatactttaaaatagtgcctacctttgtttaatgtttcatgacatttttcatgagcaattaaaccgtaattgctgcgaataaataaattaggagaatgtagtagaataaaaatttgtaaatgaacttttaaaaaataattatgctttaaaagatgtctacttgaaaatagtttcaaaaatctttttgtgacaacttgcaaccttaaagttgtgttaagtaaaattgagtaattgatattcattaaaaatttagactcaactgtggaaaagaaatcttgtcatgtgtggtcaaagctggctaagattggctagatttatttgtgaagttttattaaaaattagttctactagtacattgatgcaaaagtagaatttggtcgtctttctaaaaattatgaagtttccttgaactattggtctgagaatgtgaagggttttttttttcctttaagtaattggcctagaaaataaaaattttatgtcttatcaagggaatttcttgttcttgatgttgtcttttatcacgtctttggttacttaagaaaactaaatcttctcaatatcaaaaaacctaagtttttcttcacaactatgtaatctgctatatttgcctttaaaatattttattgtcaccaacatggtgaaaccctgtttctactaaaaatacaaaaattagtctggcgtgatggtgcgtgcctgcaatcccagctacttgggaggctgaggcagcagaattgaacccaggaggcggaggttacagtgagctgagattgcaccactgtactctagcctgggcaacaagaatgaaactctgtctcaaaaaaaaaaagttatcaacactttgattagataaccgagattatgtttaattaagtgctttaacccttttgacattttttataaacttcccaaaatcatattctaaattaagtctttttaacttcaagttaattttggtattttccagttgagccccaggatatctcaaaaggtatgtctctcacctagtaaaagaaagatattaaaataattacacttatttcatatgttaaattatataggaagcattgtgaaatgagaaataatgtttaaccttgtttgagttaaatttgtatggacatgttattaatatatgctccagaaactataggaaattcctagaaatgtagtatgttatcagtcataattttgattattatgttaaaaggttgtatgccacagaaatcaaattttcttaattgtatcactattataatgaactctcatcagatctttaaccatgccattttacatctttatcatccatagacagttattttacttaaattattctgtaaaagcatttgcaagacttagctccagttcaaagttgcttctttgtcaaggaaattaataaaaagactgtgtcaattaccctggaatacaggtttctgataactttaagataataccattggacttggttagacattccagaactctagtgaaaatgatgggctcatgaaactgtgatctcacgatcaagcagaacaaatattaactacgtggattgtagtatcatatggcttcatgtattaactacatgaatataaactgatgaacataattttcacgttaaaaaaagttatttttgccgggtgccagtggctcggctcacatctgtaatcccagcattttgggaggctgaggcggacggatcaccagaggtcagaagttcgagaccagcctggccaacatggtgaaaccccgtccctactaaaaatacaaaaaaaaaattagccaggcgtggtggtgggcacctgtaatcccagctacttgggaagctgaggcagtagaatcacttgaacccgggaggcagaggttgcagtgagccaagatcgccccattgcactccagcctggacgacaaaagcaagactccgtctcaaaaaaagaaaattatttttattttctttatttttctttctaacacttctccctcaccacccatgagtttttatttgaaacattgctggtttttttgaatgttttattttccagattttctttttttgttgagacgcagtcttgttctgttgccaggctggagtgcagtggtgcaatctcggctcactgcaacctctgcgtcccgggttcaagcgattctcctgcctcagcctctcaagtagctgggactagacaagctccactgcgcacagccaatttttgtatttttagtagagacaaggtttcaccatgttggccaggatggtcttgatcttttgaccttgtgatctacgtgccttggcttcccaaagtgctgggattacaggcgtgagccactgtgtccggcctattttccacatttaaaaaagtttttttttttttttgcctgggtgcattggctcatgcctgtaatcccagcactttgggaggccgaggcgggtggatcacctgaagtcaggagtttgaaacgagcctggccaacatggtgagaccccatctctagtaaaaatacaaaattatctggatgtggtggtgtgcacctgtaatcccagctacttgggaggctgaggcatgagaattgcttgaacccgggaggcagaggttgcagtcagctgagatcgcaccattgcactccagcctgggcaacaagaatgaaactgtgtctcaaaaaaaaaataaaataaaaaataaataaataattaaaaagatgtgtttcccccccccttttaaactatctatagcttacagcaacttggcaaactttattagacaaaaatggaaacatttactttttctccctacctaattcctccagaattcagaagctattcatgagttttttttttttcttatctacctacaatctgaactagctcttgaattctgtttattttctccatcatctggccacaactcttcaaactaatatttccaattttctcccacccttctgttttggaatcactgaaattaaaactgctcttttcctgaagtcctgcaagctgaagctgacaacttgacataaacttcagagaagctgccacaacagtttatgtatggccagccttcatgatagccaaacagcaaaccagggaaatctgtcattttccactgcttgctgaagatggttcaggcccagcatctagaaatcttctggagcggctgccctttggatttagaaactgagtttacagtttgttcccactattaaccttgtttttcttttattttcatagaaactgaacttcccttattaaaaacctgctgacttacacttacactatctaggagagctccactaacaagtcccaacagatgattttgctggtccttaatgaaccagctaagattggctagatttatttatgaaatttgattaaaaattagttctggtaggccgggcgcagtggctcacgcctgtaatcccagtactttgggaggcagaggcgggcagatcacctgaggtcaggagtttgagatcagcctaggcaacactatgaaaccccgtctctactaaaaaagtacaaaattagccgggcgtggtggcacatgcctgtaatcccagatactcaggaggctgaggcaggagaatcacttgaacctgggaggcggaggatgtggaggatgcggtgagctgagatcatgccattgcactccagcctgggcaacaagagtaaatctctgtctcaccaaaaaaaaaaaaaaaaattagttctggtagtacattgatgcaaaagtagaatttgatcttctttgtaaaaatgacaaatttttcttgaactatttgagaatgtgaagtgtttttttttccttttaagtaattggcctagaaaataaagattttgtattttatcaagataatttattgtacttgatgactgaaccaaaaaccggacttatattgttcaaagggaagaagaatgtctctttcctttgaacaagaagggggactgacaaagattctttgcttggccaaactttagtaagatttctgaatcatctgcacacttccctgtaaaatctagtttaagcaaaaaccctgctaagtccgtttagtgaaaatcctcatccttgacatctgatcatcgtcagtatctgatcaggttcctcggcctccaccatgccccaggtgatattggatcaccctggcttgtcttcagcaagaacctggttaagtcaatttagccagaatcctcctaacccctgatgcttcctcttagcaattttccatctgctgacccccacccaatctacttcttaagtataaattcccacttgcccatgctgtgttcagagttgagcccaatttctcttccccggtgcaagaccccattgcagtaccccattaagtgttcctaatagtgattgcaataatcctaaataggccaagcatggtggctcacgcctgtaatcccagcactttgggaggccaaggcgggtggatcatctgaggttaggagtttgagaccagcccagccaacatggtgaaaccctgtctctactaaaaataaaaaaatcagccaggcatggtggtacgtgcctgtaatcccagctacttgggaggctgaggcataagaattgcttgaacccaggaggtggaggttgcagtgatccaagatcatgccattgcactccaacctgggccacagagcaagaccttgtctcaaaaaacaaacagacaaacacaaaaaacaaaccaaaaaacacaaccaaaaacaatagtcctaaataaagtcttccttactgtgctttaacaagtatcattgaggccgggtgtggtggctcacgcctataatcccagtactttgggaggcagaggcaggtgaaccacgaggtcaggagtttgagaccagcctgaccaacatggtgaaatcctgcctctacaaaattctgtaaaaaaattttacaaaatgtttttgtaaaaatacaaaaaaaattagcctgggcatggcggagtgtgcctgtaatcccagctactcaggaggctgaggcaggagaattgcttgaacctgggaggcggaggttgcagtgagtcgagattgtgccattgtatttcagcctggacgacaagagcaaaactccgtcaaacaaacaaacaaacaaaacccacaacaacaaaaaaactcaaatattattgaatatttttccttaacattagtttatttcatacatatatacattcatatagatatgtgttcatatataactatataaaatctatcctatagccagtctgtccaacacccacacttttttccttggcttaagttagacattgtcagttttggttgctttccatcaaaataatcatatctagtacctctgctatcttctatatggaggccttggtctgattggacagacgtggccatgcctttgggagacgcttctgaaggaggcaggccttgccccaggaagcctcagccagaaggggaaaaataagaagtcattgctgccgggtgcagtggctcatgcctgtaatcccagcactttgggaggccaaggcgggtggatcacctgaggtcaggagttcgagaccagcctggccaacatggtgaagccccgtctctactgaaaatacaaacattagccaggtgtggtggtgcatgcctgtagtcccagctattcgggaggctgaagcaggagaatcgcttgaatctgggtggcggaggctgcagggagctgagatcatgccactgcactccagcctgggtaagacagagcgagactgtctcaaagaaaagaagtcattgcatatataggaagctccaaacaggtttgaatcttgggtgctccggctgtgtatccaggtgctgggctgttctgacaactatggccatggattccagggacttcctggaagggtgattttccagttaacttttgttataccgacatctaggctgagacaccgatatttatgtgtgttctcagagacagagcctaaagtggggagacagtgttgggggcaggaggcagaagaaggaggggtgggggcagctggtgctcgtggacaggaaatttcctcttagagcctcctgcaagtgggaaaacacccacaccttaggtccctgtgaccatacagtgcctggccctggtgagttaaaactcaatttgaggtggggtgtggtggctcacacctgtaatttcagcactttgggaggcagaggcaggaggattgcttgaggccaggagttcaggaccagcctgggcaacatagcgagacccctgtctctctttttttttgagacggagttttggtcttgttgcccaggctggagtgtaatggtgtggtctcgggtccctgcaatctctgccttctggattcaagcgattctcctgcctctcagccttctaagtggctgggattacaggcatccgtcaccacacccagctaatcattgtatttttagtagagagagggtttcaccatgttgaccaggctggtctcgaactcctgacctcagttgatccacttgcctcagcctcccagagtgctgggattacagatgtgagccactgcacccggcctgtattttttttttgtttgtttttttttttgttttttttttttttgagacagagtctcgctctgtcgcctaggctggagtgcagtggcgcgatcttggctcactgcaagctccgcctcccgggttcacgccattctcctgcctcagcctcctgagtagctgggactacaggagcccgccatcacgcccggctcagtttttgtatttttagtagagatggggtttcactgtgttagccaggatggtctcgatctcctgaccttgtgatccacccgcctcggcctcccaaaatgctggaattacagccgtgagccacccggcctgttttttaaaaaagaaaaatacagtccagctgtgggggctcacgcctgtaatcctagcactttgggaggccaaggtgggaggattgcttgaggtcaggagttcaaaccaatctggccaacatagtgagaccctgtctccaaaaaagaaaaaaacaaaaaaaccaaaaaactacgtaactcaatttgtgtttttcttcccgtgcaaaaaacaaaaaaacaaaaagccacgtaactcaatttgtgtttttcttcctgtgcagtggggtcactggcgttcgcccctccccagttgccatttccctgtctctgttgcccctagtctccttaccttctctgtccagctccctgaagcccctaagcagcctcttttttttgagacagagtcttgctctgttgccccagctggagtgcagtggtgccttctcggctcactgcaacctccacctcccgggttcaagctattctcctgacttagccttacaggcacctaccaccactcccagctaatttttgtatttttagtagagacggggttttgctgtgttggccaggctggtctcgaactcctgacctcaggtgattcactcgccttggcctcccaaagtgctaggattacaggcgtgagccaccgtacccggccccctaagcagcctcttaaactggccatctgagaagcagaactcttgaggtgaggagtttggtttggggctcagagggccgcgcgtgtgtggcctctgtctgtccggggatggggtgggcgtgtttggctttcgaggtggattcgtgcttgtgtgagagggtgtgtgtttctcattcctggtatcctcagttccgggcgtggcgtgtccctccgtgtgagtgacggtgggaaggtgaggtgagagtggccagggcggggtggaactgttttctctcggcccgtccaggttggctgcttttgggtaattcccaggctctgagatgtcacagagccaggacgggaggagtgagtcacccccaccattccgccattgccctggagaagcttcttccctgtccccagggcccggtttcactgggagccataaaaaggccctgcccaagcttggtttcttccgttttcagccggacctgctgaaaccaagcctgggggctgcctgggagcgtgccaagggcactgcccagatggggcccagcccagagggaaaccagcccagcagggacccagctccagctaaggccagaaaccagagcccacccttgggggctgttctgttcctggtctcatctggtttatacatatatatatatacacatacatatatatatatatacacacacacatacacatacatatatatatatacacacatacacacatatatatatatatatatacacacacacatacatatatatatatatatatatattttttttttgacacagtgtcgagctctgtcgcccaggttggggtgcagtggcataatcttggcttagttcaacctctgcctcccaggttcaagtgattctcctgcctcagcctcctgagtagctgggactacaggcatgcaccaccatgccctggctaatttttgtatttttaacagagatgggttttcaccattttggccaggctggtctcgaactcctgacctcaagtgatccgcccaccttggcctcccaaagttctgggattacaggcattagccaccgcgcctggccacatctggtttatatcttaagcccctctgcccaccaggagccccttcccctgcaggactatgccccaggccccctccactcccagactcccctctgtaagctcccctttcttccctgagccccattcctctccaagagccccctcccctatctgaagctcctcttctcctggagacccttcccctcccagttcccccgcaccccctccctccactgcccctccctcttaaagtcccctacccttctgtcctgtcacttccctgccctctcgctccctggggtgggagggcctggcttggcgaggcggctaagagaggggaaggggctcagggtgggggcagggcatgtctggggtctgccagcttgtcttggcctggctggctctctattccattatgaacatgtggctggggtttctgccatcctcccaggccctggtggggtggttggggctgagagggtgatggggaggggaggaggaaggggccgcaatgccaatcacatcaccccaggggctcagaacagctcccgcctctcctcctcctccccttctttctcgcccccacccccctccccaccttccagagcccattagcccagggctgcagtgacacctgcctccactggggatcctcccctactcctggggccatagctgctcccccaagggtgggttaccctcttgccttttgaccttcccagggacctggcagtcctgcccctgggtggccacctcttcagcctctcccagagccttggccacacttgctgtgccgtccgcaaacacccaagggggcaccgtgcccagtccaggaatcaggcagccatcaccttcccagccagaccctgggaaggatagacccacagccttagccatatacagagcactgggcaacttttacttttcaccatgatgagcaacttgtcaaaagaatttgcaaacagacaggtgcggtggctcccgcctgggattataggaggctgaggcgaggggatcacctgagatcagaagttccagaccagcctggccaacatggtgaaaccccatctctactaaaaatacaaaaattagccaggtgtggtggcgtgtgcctgtaatcccagctactcgggaggctgaggcaggagaatcacttgcacccaggaggcagaggctgcagtgaactgagagcttgccactgcactccagcctggatgacagagcaagactccgtctcattaaaaaaaagaagaagaatttccaaatcctacctctggctcaccattaaaacagccaatttgggggtgtttggggcagccggttacaattctccctctctacccctccacctgccactagcacaggtgcgattttcaaaattcccatcaacgggtgtgggacaccctggatgctgcagttcccacaagcaaacaggcgagggcgactctagggagagtcaccgcggccgtgggctggcccagccttgaggagagcattgacacacagcgtttgccagaaccatggccagggacgctgcctacttgctggaggtccctgctccttctggacagggatttatggttgggtgcattgcttagaataggaattagctaccatttgactgactttttggttttttgcttttttccccatctacgtcaagttcactgacttcattatctctattctacttttgagctcattcaaggttttgttgtattattattattattttagagggaatctcactctgtcgtccaggctggagtgcagtggtgcgacctcagctcactgcaacctctgcctccctggttcaagcgattctcctgcttcagcctcctgagtagctgggattacaggcacccaccaccacgcccggctaatttttgtatttttagtagagacgaggtttcaccatgttggctaggctgatcttgaactcctaacgtcaggtgatccacctgccttggcctccaaagtgctgggattacagacttgagccaccgtgcccagcctggctttgttttatcattgcggttattatattgttcagttctaaactttatttaaatttttttattttcatttatttatttattttttatacagggtcttgttctgtcacccaggctggaatgcagtggtgcagtcatggctcactgcagcctccttctgggctcaaacaatcctcccatctcagcttcccgagtagctgggaccacaggcacaagccaccatgcctggctaatttttaatttttttgtagatatggggtcttgctttgtcacccaggcaggtcttgaactgctggactcaagagatcttcctgcctttgcctcccaaagtgctagaattacagacatgtaaaatttctgtttggggctgggtgcagtggctcatgcctgtagtcccagcactttgggaggccgaggcgggaggatctcttgagaccaggagtttgagaccagcctgggcaacatagcgagacctcatttctacaaaaaaataaaatattgacagtgtggtggctcatgtctgtagtcttggctactctggaggctgacgtgagaggatcacttgaacctgggaggtcgaggctgtagtgaactatgatcatgccactgtactccagcctgggtgacagagggagaccctgtctcaaaagaaaacaaaaaattgtttggctcttctttacatcttctcttctttgcaaagactttctatatttccattgatttcaagagtgttggcctttcttgcaacattttgataataattgctttaaagtcttgatctgatatttccaatgttttgtcatctcaacattgaccactgttgatagtcttttctcctgtgagttgaaattctcccggctctttgtatgctgagtaattttggagtgtctccaagatattttaaatattaggatataggaatctggatctttatacaattctatggagaatgttgatatttttgttttagcaggctgtggtttttttttttttttttttttttggacatgctggacctaggaaccctgaatttccactaccttgctgtgtctccacacccttatcacagccctgcgtcatctcaggcagctctgaccacctcctgaatgtccatggcctgaccagaagcccttggagaactgccctatgggtttctgagttcctccctagcataagtgagtttggggctcagtaatgtcttggaaacaaacttgggtagacttgatgcttgttatggttacacaccctggttacacattatgctaagtgaaagaaaccagacacaaagcctctataatatgtgattattgattccatgattctggacatttcatagacctatgattccatgcctactttgaaatgtccagaataggcaaatccatcatgacagaaagattaatcacttagggatatatgaaatatatggaatagggataaagggtttggaatttctctttttgttaagaaacaggggcttactctgtcacccaggctggagtgcagtggcccagtcatggctcactgcagcttcaagcttctgggcttgggccaggcacggtggctcatgcctgtaatcccagcactttgggaggctgaggcaggtggatcacctgaggtcaggggttcgagaccagcctggccaacatggtgaaaccttgtctctactaaacatacaaaaattagctgggcttggtggcatgtgcctgtaatcccagctacttgggaggttgagtctggagaattgcttgaaactgggaggaggaggttgcagtgagctgagatcgcacccctgtaccccagcctgggtgacagagtgagactccatctcaaaaacaaaaataaaaaaccccaaaaacttctgggccggagtgatcctccctcctcagcctccagaatagctgaggcagctttattgagctataactgtttaccagtggttctgggttcaaattctaactccactagctgtgtgactctgggtgagtcactttaatccaccaagcttctgtgtcctgcgggttaatagtgtctgtggggggccagcctggcattggacaggcattcgagaagtgctaattattgtttttgaagcagctttattgacatagaagtcacatatcatacaattccccctttcaaaatgcacatttcaatggcttttaggatactcacagaggtgtgcaaccatcatcacggtcaattttagaacattttcatcactacaaagagaaactacaaacaagagctgggtgtagtgccttatgtctataatcccagcagtttgggaggccaaggtggaaggatcacttgatgccaggagttcaagaccagcctgggaaacatagcaagaccctgcctctaccaaaaaaaaaaaaaaaaatttaactgggcatgttggcatgcacctgtggttccagctactcaggaagctaaggctggatggtcacttgagccccaggagattagggctgcagtgaactatgatcgcaccactgtactccagcctgggtgtcagagtaagaccctgtctctaaaaaataaaaaatagaaaagagctgggtgtagcagcttacatctgtaatcccagcactttgggaggccgaggtgggcggatcacctgaggtcaggagtttgagaccagcctaaccaacacggagaaaccccgtctctactaaaaatacaaaattggctgggcgtggtggtgtgctcctgtagtcccagctactcgggaggctgaggaaggagaattgcttgaacccgggtggcggaggttgcagtgagccgagatcacgccattgcactccagcccaggtatcaagagcgaaactccgtctcaaaaataaaaataaataaataaataaataattgttactggccttgtcctccaagataaaaaggtctgatctctccccagtccatccagaacacagagaagggaaataattgggaaggtcattttggaccagactcatccatggtgatgttagatgggacagggaatgccacatccccaaaagcggtgaagccagacgtacagggtgctgggtcagatgctggagagagagcagggaattgtggctttggtggtcacggagctggggacatggggacagggagagccttgtgtgtgtgttcgctggtatgacccagcccttgggtagctctggggcctgggcaaggatgggctggatgaggaagccaggcaaggaagcaggtccatcctgccttgagctgatcgtctgctgcctctgtccccttgccgtccccgcactgtccctgggctggcacacctgcactgaagctcttctcagcatctcaccctgaagattctggcttctctggatgacttcgacccttttgtgctgctataaaggaatacttgaggctggataaggttttttttttttttatactttacgttctagggtacatgtgcacaacctgcagctttgttagatatgtagacgtgccatgttagagtgctgcacccattaactcatcatttacatcaggtatttgtcccaatgctatccctcccccttccccccaaggctggataaatttataaggaaagaggtgtatttggctcatggttctgcaggctgtacaggacgcatggtgccagcatctgctgctttttttttttttttttttttttagacagagtctcattctgttcctccagagctggagtgcagtggtgcaatctgggctcactgcaacctccacctcttgggttcaagcaattctcctgcctcagcttcctgagtagatgggactacaggtgttcaccaccacgcccagctaatttttgtatttttagtagagacggggtttctctatgttggccaggctggtctcgaaatctgcctctttatgagagacaaggtttcactctgctgcctggtgggagtgcagtggtgagatcctagctcactgctgcctccaactccttggctcaagtgatcctcccacctcagcctcccaagtaactgggactataggtgtgcactggtacacctggctaattaaaaaatgtcctttttttttgagatggaatctcactacgttgctccggctggtcttgaacttctgggctcaagtaatcctccccagccttggcctcccaaagctttggattcacaggcgtgagccacctcgcccagccagcacccgtttatggtgagaacctcaggaagtttccaaaggtgtttgcagatcacatgatgacagaagaaggtagagagagttggtggggagtggggcaaggaggtggcaggctctcttcaacaaccagttcttgcaggaactaagagtgagaactcgctcccttctgcaagaatggtaccaagccgttcatgagggatctgttcccagaacccagacacctcccaccagatccaactccaacactggggatcaattttcaacactgggctgggtgaggtgactcaaatctgtaatcccagcactttgggaggccgaggtgggcggatcacctgaggtcaggagtttgagacctgcctgactaacatggtgaaaccctgtgtctactaaaaatacaaaaattagctgggtgtggtggcgcatgcctgtaatcccagctactcaggaggctggggcaggggaatcacttgaacccgggagacggatgttgcagtgagtcgagatcacgccattgcactccagcctgggcaacaagagcaaaactccatctcgggaaaaaaaatttcaacatgagatttcaagtggacaaatatggaaaccataaaccatagcaccggcccctccacctccagttgccctctctcaccttctttcagccacacctcccaggccccaggtcctaccccagctctcccatgcctccgggcctttgccacatgtttttccacctaggaggtgagttcctcctactcactcacctgactctccccttcttaatttttctctccagtttttattttgcaaacttaaaaccaggctggctgggcgcagtggctcacacttgtaatcctagcacattgggaggccaaggtgggtggattgcttgagcccaagagttcaagaccagcctggccaacatggcaaaaccccatctctacaaataatacagaaattagctgggtgtggtggcatgtgcctgtagtctcagttaggaggctgaggtgggagggccacctgagcctggggaggttgaggttgcagtgaggcaagatggcgccactgcactccagcctgggcaacagagtgagaccctgtatcaaaaaaaaaaaaaaaaaaagaggaaaaaagaaaaacttaaaaagctacagaagcctgagtgcggtggcttgagcctgtaatcccagcactttgggaggccgaggtgggcggatcacttgagaccagttgttcaagaccagcctggccaacatggtgaaaccccgtctctactaaaaatacaaaaattagccaggcgtggtggtgggcgcctgtaatcctagctactcgggaggctgaggcaggagaatcacttgaacctgggaggcagaggttgtagtgagccgagatcacaccactgcactccagcctgggcaacagagcaagactccatctcaaaaaaaaaaaaaatctacggaaaagttgcaggaatagtccagtgaactttcagatgccctttgctccagttcaccaaacgctaacattactatggttgcagtctatctcttctctccctacatacacgcacttcgctttttcctgaaccatttgaaagctagatgaatacatcatgacaattgactgtccagaacttcagcatgcatctcctatgaacaggacattctccaccagaggttctggaacttgagcaacgttgagtactgagtcctgcccgctggctccttcaatgcccctttactgcccaagcagaagccaggaagtctccctagaggaggtgaggctggggctcagcttccctcctttcttcctttgatttcctccctccctccttcccttccttctttcctttctctctccctcccttgctttctccctcctccctgcctccctccctttttccttccttcatcccttcctccctccttcctttcttcctttttttttttgagatggagtctgctgtgttgcccaggctggagtgcagtggcacgatcttggctcactgcaaccttcaccccccaggttcaagtgattcttgtgcctcagcctcctgagtagctggaactatgttgagtgccaccacgcctggctaatttttgtatttttagtagagacgaggtttcaccatgttggccaggctggtctgaaactcttgacctcaggagatcctctcacctcagcctcccaaagtgctgggattacaggctcaagccactgttcccggcctcttctttctttcttccagctcttattttttaatttattttttaaatttttatttatttattattttgagatcaggtctcgctctgttgcccaggctggagtgcagtggtacaatctcggctcactgcaacctccgcctcccagtttcaagcaattcttctgccccagcctcctgagtagctgggattacagatgcctgccaccacgcctggctaattttttttgtattttaagtagagacggggtttcaccatgctggccaggctggtctcgaactcctgacctcaggtggtctgcctgcctcagcctcccaaagtgctgggattagaggcgtgagccactgggcctggcctacaggctttatttttaagaacagtttcagatttatagaaaaattgagaggatcatacagagttctgtgtatccccacactttctcctactattaaaatcttacattaatactgcctatttgtttcagttaatgaaccaatgttgatatcaatattgatacaatgttattaactgaagtgtatgctttatatggattgccacaggtttttttgtttatttatttatttatttttgacagagtctggctcggtcacccagactagagtgcagtggtgtgatcttagttcactgcaacctccgcctcccgggttcaagcaatcctcctgcctcagcctctcgagtagctgggactgcaggcacccgccaccacatctggctaatgtttgtacttttagtagagacggggtttcaccatgttgcccaggctggtctcgagctcctgacctcaagtgatcctccctcctcagcctcccaaagtgctgggattacaggcgtaagccaccttgcccagccacacagttttttatctaatggtctttttctgttccaggatctcatctgggatcccatatcacatttatttacatacaatttacacttacttacatactatttacatttatttacacatatttgcattcgtttacatatattgatttctatggctcttccccagtgttctgtttctgcttcaggagcccacccaggacaccaggtgacatttagtcatcacgtaacgacggctcctcttggctgccacagtgtctcagcctttccttgttatgacgatcttcaggttttaggagtgctggtcagctatatcgcagatgctcctgtcttgggatttgtctgatgtttttctcatgattagattaggattatgggtttttaggagaaagatcacaggtaaagtgccatttgctttacattctatcacgagtatagattattagcatgacaaataactactgatgttgactttgatctcctggctggggcagtgattgccagctttctccgctgtaatgttacccttcctgtgctgcaccccttggaacgaagtcaccctgtacagcccatactcatgttattctccccgccatgagggcagaagtatctgcatacattttttggagtttaaaaacttcttttaaactaaaaaaaacacttttttttttttcaggcagagttttgctcgtcgcccaggctggaatgcagtggcccgatctcggctcactgcaacccccgcctcctgggtttaagcaattctcctgcttcagcctcccgagtagctgggattacaggcgtgcgccaccatgcccagctaatttttgtatttttagtagagatggggtttcaccatttggccaggctggtcttgaactcctgacttcaggtgatccacccgccttggcctcccaaagtgctgggattacagatttttttgtttcttctttttttttccattttattttatttttttgagacagaatctcgctctgttgcccaggctggagcacagtggtgcagtctcagctcagtgcaacctctgcctccgggtttaagtgattctcctgcctcagcctcctgagtagctgggattacaggtgccttccactatgccccgctaattttttgtatttttggtagagacagggtttcaccatgttggccaggctggtctctaacttctgaccttgtgatctgcccacctcggcctcctaaagcgctgggattacatgcatgagccatcacacccggcctccattttatttttgttttattcacaaagaccccaataacaactattttaattttttgttggttggttggtttgtttttgtgacggagtctccctctgttgcccaggctggagtgcagtggcgtgatcttggctcactgcaacctccgcctcctggattcaagcaattctcccacctcagcctcccaagtagctgggactacaggcatatgccaccacgcccagctaatttttgtacttttagtagcaacggggtttcgccacgttggccaggttggtctcgaactcctgacctcaagtgacccaccaacctgggcctcccaaagtgctgggattacagttgtgtggcaccacgtccggcctaaaatctttaaaaaaattgtttttttttttttgtagagacagggtcttgctatgttgcccagggtggtctggaactcctgaccttaagtgattctctcacctggacctcccaaagtgctgggattacaggcgtgagccacctcgtctggtcccaccagtgatttctgattcctcagtgtgactgcaaggccagtgagccccaggccctgaagacatcacacaaactgaagcctggaggtttttatggcagccaaagcttggcaatggctgatgggacaagtgagggccttcccttcctgatgtcctgggaccgcatatatccaggtcagagtgggagctacaggaaggactgactgtgagttctctgccagcctgctgagatggcaaagaatgggaatgaaattgactgaaagaaaataaacatggatgcttgttgcacggatgtgggtgaggagagccagcctgtatggggacatggggatggagactgatgctgggggggtagtgacaccaactgggtggcagctggcaggcccctgggcatccacactccccctgctcagttggagagaagcaagaaagcataaagggagggagggagggaggaaaagaggtgggagatgagtgctgtgggtgagcgctgaagcacacttcaaaagctcaagccacaatgcttacgccctgatataaaaagagcattgagttgagcgtggtggcttacgcctgtaatcccagcactttgggaggctaaggcgggtggatcacttgaggtcaggattttgagaccagcctggccaacatggcgaaaccctgtctctactaaaaatacaaaaattagccgggcatggtggcgggcgtctgtagtcccagctactctggaggctgaggcaggaggatcgcttgaacctgggaggtggagcttgcagtgagtggagatcgcgccattgcactccaggctgggtgacagagtaagactctgcctcaaaaaaaaaaaaaaaaaattgaaaaattacaaagctcaaacctaatcaccagtgtggctgctcctggccccaccctgcctcctgctccccaggggaggggacaggtcagagaggggtgtgcccttccaggggcctgagatgatccagacatgggagctggcagggaatgagggctccggcagggctgggtcagtaggtacacctggcaatagggcaaagatctggcagctggacttcttgggctctgagaaggcaagagattagtatctgtgtgtgacaggagagggcgtggctggtgtccacccatccatgctgggagacgtgggagagatggggcggggacacagggcaggagagaggccaggcctggggcctctgtgccgggagggataatacgatctctgagtcaccccgaaatggggtgagatggtgctgatgatcccggattccttggttttgtccctggctctgtcactgctgactcatgggctgccgacctaggagtctcctggtcagcgtgcgggtttctctcagcctcttggtgtgtcacagaagcagacagcttctctgtaaaccgtcatcctcaggggtgtgcccggcttctgggttctgtgttctggcatcctccgatattccaagaggaagcaggataggacgatcccagctccttgctctgcctactggtgacaagacctgtcctggcctgggaccaggggggcttctctgggagtcctggttggtcctgagacagggacaccctcccagtgaagccctacctcctctgtcctccatcacccagcccacagcaaggccaccctcctgactctccctccaattaacccaagctcctgggttgcgcccttgaggcccacaccgatgctcccaacttactttccagccctattccctcacctgtctggcttccgactcctcaagttgagttttccacagatacttcctccccacacacacacccgtttttgtccctgctactctccttttgcgagagctctctcctcttcataggtctctaagcttttactcacccttcaggtctcctctccacctgccacctcctccaggaatcctgcctggtgtgccccaggtagagttgatttttcactctccagtgctcacacagagcttgttttccctgcgtgggagctgtttatttaaattcaggctggcctgattacaccctgatgagctccatgccagccctgggcctggcccagtgcgctcagcatgtccttccagaaagaatgaaggaataaaaaaagacgaagagtaataaataggagagtaggggtagaggatgagccccagaatcagacattaggcagggtgtggataccagtcttgccattattctggtggccctggaatgtcacatcagttcccagagccttagttttctcatctctaagatgggaatgggctaggcatggtcacacctgcaatcccagcactttggaaggctgaggcaggaggatcacttcttgaggccaggagttcgagaccagcctgggcatcatcgggagaacctgtctctacaaaaaaataagaagttagctgggtgtggtggtgcacacctgtagtcccagctacaccagaggctgaaggtggaggttttcttgagcccaggagtttgaggcttcagtgagctacgactgtgccactgcactgtagcctgggtgacagagcgagacttcatgtcttaaaaacaaaaacaagagaacaacaatgatgcccctgcactgttttgcagtgagataaaatgacttcctgttattcaatgttatccgaaggcatttaggttagtgcctggccccgaagcaggtgctcaaaacatggtttactggctggcttgctccctgagaggccagggcagaggtgcctggcaggaggaggctgccctgaatggggagagggaggggtggggctggagaggattgactcctccatcagattagagggtcttcaggaattccaccgcccttaggtcctcttcctccctcgcctctgggaaattggagtaaaatccagtagagacaggactgccctgaagtgaggaggcgggagccggagggagtcggggaggtgggtgggaaggagggtttatggacctccctgtgaagtgggggaatggcctgtgaagggctggacagctgggtaggatggtgggaatgctgaaggtcacggtaaatacgggcttgctaattatttatttattagagatgaggtcttgctctgtcacccaggttggagtgcagtggcatgatcatggctcgctgtagcctccaactcctgggtttaagtgatcttcctgcctcagcctcccgaatagctgggatttacaggtgtatgcgaccatgcctggctaattaaaaaaaaaaatttgtttttgaaaaagggtctcactatgttgcccaggtaggtcttgaattcctggcctcaagtaatcctcctgcctcagcctcccaaagtgctgggattacaggcatgagccaccatgcctggccaggtgttttgaaactgacagacataaactgaaatcgatgcaccgatttggggtaaagtaatttaacaacggtcctctaagtcctgtcccctgtgtaagcctcctccccttcacacagtcatctcttctgagtctctctaactaagctctctcaccgagtcccctccctttgctcagcccctctccccatccttgccaccagaagtgccagaccctgggactccagccaggaggcatcagtatggtctttcttctcttccttagaagaaaccccagaggtggccaccgcccccacccacggcccacgtggtgcccaacctgggggcagcacccgctcagccagtctcgccagactggtcagccaggcctgccatcacccagcaccaggccgagggggtggatggtccgctggtgtgggcggtcaggctgagggccagggactctcctgttcagcctggtgccaggactccaatctgagctcaaggacttcagaaagaaataggatcttgttgcctaaagaaagaaaaaaattccatcctttactattttttattttttgagttggagtctcactctgcctcccaggctggagtgcagtggcgtgatctcggctcactgcaagctccgcctcccaggttcacgctgttctcctgcctcagcctcccaagtagctgggactacaggtgcccaccaccatgcccgactaattttttgtattttgagtagagatggggtttcaccatgttagccaggatggtctcaatctcctgacctcgtgatccgcccacctccgcctcccaaagtgctgggattacaggcgtgagccaccgtgcccggcctactgttttttattttttaagagacaggatcttggtctgtcgctcaggctggagtgcagtggtgtgatctcagctcactgcaacctctgcctcctgggttcaagcgattctcccacctcagtctcccgagcagctcccgaccacaggcacacgccaccatgcccagctaatttttagtatagacggggtttcaccatgttggccaggctggtctagaactcttggcccaagtgatccttccacctcagcttcctaaagtgctgggattacaggtgtgagccactgtgtccgccctaggaatcaatttaatatacactggcttccctggctttagtcttcctgttcccagaagacgtggagtacgggctctgggagctagactgctcagctcacagagatctttttggctgcaggacagtggtccatcactggccctggggctcagatgccagcgggagcttggggttagaagggagactttgtttttgcccctttgctagggactcccagggagctgaactcagggcaagctgcatgtgtgtgtgttacaactggggacttggggccaggcggggtagctcacgcctgcaatcccagcattttgggaggctgaggagggcagatcacttgaggctagaagttcgggaccagcctggccaacatgctgaaaccctgtctctactaaaactacaaaaattagctgggcgtagtggcgagcacctgtagttccagctactcgggaggctgaggcaggagaatcgcttgaacctgggaggcagaggttgcagtgaaccgagattgcaccactgcactatagcctgggtgacagcgacattccgtctcaaaaaaagagaacaaaacaaaacaaaacaaaacaactggggacttggccaagcccctggaactctggggacaggggtctgaaaagtcctagctcccacctgttatgatcaggatccgaactgcgcagcagctgctttgcgtacggaactttgctccctcctcttgttattaaactttttggctcacaaagcatttttacttccttctctcatttcatgtgtatctcagactggggagtgggccccagtgttctcattgtacaaaggaggaagttggggctcagagatggaattggcttctccaaggtcacagggctggtaggatggcttatggatacacagcttcccagcttttgtcctgagctttttggctcatgaagcattttcacatccccatctcatttcacgtctgtttttgtttttgatcctggagggggtgcaacatcctcatttttacaaaggaggaagctgtggctcagagatggttcctgggctggaaagatggtttatggggtgggcagagatgggtgagctgatctggtggtttttatccttgatagaaaccagcaggtgtggccaggcgcagtggctcacgcctgcaatcccagcactttgggaggccgaggcgggcagatcatctgaggctggaagtttgagaccagcctggccaacatgctgaaaccctgtctctactaaaactacaaaaattagctgggcgtagtggtgtgcgcctgtactcccagctactcgggaggttaagccatgagaattgcttgaacccgggaagtggagactgcagtgagcagagatcgtgttgtctcaaaacaaaaaacaaacaacaaaaacaacaaaaaacaacaacaaaaaacaaaaaaaagcacgtgatccaattctgtcagcacaaaatcacacagtgcatgttataaagaagaaaaagaaaataaatgagtgccaaccctgtactctctgaccccaaaaccaaggtgatgaatggcagatgtcttataaggtgttcctgtaaaagatcttcgggctttgggaagagggccagatgcaggcctagaggtaaatttccttgttttcctctgccttagggctatgggagctggagcggagaggagagaagcaccttgcctttgctggtgtttttcccgcagcaggtgggtgggactgagccaacggtctcttggcatcaacaaagcatcaacaaatctctctccagctccacttgtgctgagctactggctgatccccaaggacatccttctggcctctccttcacacctgggtcccctagccctgcgtgagctctgtgcttcttcccctgccctgtgtctgctctatgcctggagcctctgtacctgccctctcctcaacccccaacccctccctgctctcagctcccgatacgcgtggctatgcctgggagggaaggacagcttcttagggccacaggtggactgttgtagggcttgcatgctcccctcccccatgcctgcttctccaagtggcacttggctgtgtcccaggaaagcaagggcaggaagtggcagggcgggggccgggggccgggggggcaggaggcgggcggggggttggggggggcaggttctggccatctggccaagtcacgtgtctactcagaaagcttgttaaaggctacctggctgggaccacaggtaagaggcacctggggaaggaggcacccatgctggagtgcccacccgtcctgggcaaggccctggccttctctgggcttcagtgtactcctttgagccaaggcaataaaagtccctgccctgctgactggcaggaggctgtgatgaggtcatctccaggaaagcacttatcgccaatcatgatgttacttatctctggtgttattcagcccataggctctgtgtgtagagggagccttgtaaagaaagccccagggaggcgtggtctgggcagaaaccatctctgtttgctttggtgtgtgtgcctatgatgggggtcaaggtataggagtgtgatttgaaactggagaatgcttcgttctttccatcatcaaacatgtctttttttttctttttttttagatggagtctcgctctatcacccaggctggagtgcaatggcgcgatcttggctcaccgcaacctccatctcccaggttaaagcgattctcctgcctcagtctcctgagtagctgtgattacaggcgtgcgccatcacacccagctaatttttgtattttttagtagagatggggtttcaccatgttggcctaactcctgacctcgtgatctgcccatcttggcctccgaaagtactgggattacaggtgtgagccactgcacccggcccaaacatttctttttcttttcttttgagacagagtcttgctctgttgcccgtggctggagtgaaatggtgcgattatagttcactgcagcctcaaactcctggccttaagcgatcctcccatcctggcctcccaaagtgctgggattataggcatgagccgcagcaaccactcctcacatttcttgagcatctgtgatgtatcaagccagatgctgggcactgaggttgcagaaggcattgttcctgtcttctaggagccccaggctagcagggaagacggatgtgtatagagttaaccacaataccaggcctcaacttcccgtctgtaacacaggtggaccatgctagattgtcccagcctgccctgtgcttcattagccggtcaacagatccatctcaaatacctcccatgggtactcactgattgctttaacccaaaccatggcactcttgaagactttccctcaggaagctcaaggactatgcatccttctgggtcagaactggacacacagccaccagtgctggacaatggcggcggctcagggacacactggagccctggcccctgcagagctcccagcatggttgggaagagagatgcaaaatgaccacacggcgggtgaggaggagctccctcggtgcggctgggatgagccctagacactctcaatcacccccacgatgaccccttcccagaggtcccctcagtcatctgccctgaaccaagctcttcctgatcctagaccctccaccctccctctatcttccagggcttggtgacattccaggcagaaatttctgacccttttactttggtccctccctccccagcccagtctctggtcaaactggattcctggctgttcccagaacgagctgcctttccccaccttgccacctctgcccttgttctctctgcctgaatgtcctccttcactagcctcgctgccttgcacatctctcctgagggctgtcatcccagaatgagctgcatttgtccagcctggcccaccgtctaccagaacgtcctccttcagcctgtcccactgccttgcaaaacttttctgggggacctgttcacgatgccttctgtagcatactccaagaatccggcgccccctggagttgtgccacacagcacccctttgcagtcaagctccctcagcaccaccacctccaccctggaagagttccccttccctttgaaatctcatgggactttgcacccactctggctttattggaaggctttgtatgtctccacagggtaaacacccatttactggggtgatgatgtctccaggatctagttcatgtttgtcgttggtgactggccccacccagttctgggcaagcaggctggatcccggcaggaacagagcccaccagcctaaacttccatggaggtggagaggggacaggcttctgtctctttttggctgaaggtgcatcatgtccaaggcccctcttctagccaagcagagaagctgggtgataaggatgggtgagagtgggtgatgtaccccggagtcctggcctcccggctcctcactcccctacacgtaactttatccggccaatgccgcaaagactgctggtgaggccagatgcatgagtgatcatactcacaacagtcgtgaaactgccagtgatgaaactggtaaggacaagaaatgacaataatcaaggtggggtttctcgtggacgtttccaagacttcattctcaaattctctccctcagggtccccaccctgtcctcccacctaagcctggaatgagggggcactggcctgtggggaccctggtcttcaggctcccaaacctggctgggtctggttgccccctggccttaacctgtgaacatccagctgtccctgggctgtgattcagtgtctgtctcccgggtgacctcagcatgggctttgaggaaggggagagagtagtttcttctgagactggatagtgactcagggacccggggctggggcctcaaaagtgcctttgttggcctgggctcaggaatccagagaaactggtcaggaggaggccccagtgacaaaaacccctccctctgcccccgcccctctgccagagccatataactgctcaacctgtccccgagagagagtgccctggcagctgtcggctggaaggaactggtctgctcacacttgctggcttgcgcatcaggactggctttatctcctgactcacggtgcaaaggtgcactctgcgaacgttaagtccgtccccagcgcttggaatcctacggcccccacagccggatcccctcagccttccaggtcctcaactcccgtggacgctgaacaatggcctccatggggctacaggtaatgggcatcgcgctggccgtcctgggctggctggccgtcatgctgtgctgcgcgctgcccatgtggcgcgtgacggccttcatcggcagcaacattgtcacctcgcagaccatctgggagggcctatggatgaactgcgtggtgcagagcaccggccagatgcagtgcaaggtgtacgactcgctgctggcactgccgcaggacctgcaggcggcccgcgccctcgtcatcatcagcatcatcgtggctgctctgggcgtgctgctgtccgtggtggggggcaagtgtaccaactgcctggaggatgaaagcgccaaggccaagaccatgatcgtggcgggcgtggtgttcctgttggccggccttatggtgatagtgccggtgtcctggacggcccacaacatcatccaagacttctacaatccgctggtggcctccgggcagaagcgggagatgggtgcctcgctctacgtcggctgggccgcctccggcctgctgctccttggcggggggctgctttgctgcaactgtccaccccgcacagacaagccttactccgccaagtattctgctgcccgctctgctgctgccagcaactacgtgtaaggtgccacggctccactctgttcctctctgctttgttcttccctggactgagctcagcgcaggctgtgaccccaggagggccctgccacgggccactggctgctggggactggggactgggcagagactgagccaggcaggaaggcagcagccttcagcctctctggcccactcggacaacttcccaaggccgcctcctgctagcaagaacagagtccaccctcctctggatattggggagggacggaagtgacagggtgtggtggtggagtggggagctggcttctgctggccaggatagcttaaccctgactttgggatctgcctgcatcggcgttggccactgtccccatttacattttccccactctgtctgcctgcatctcctctgttccgggtaggccttgatatcacctctgggactgtgccttgctcaccgaaacccgcgcccaggagtatggctgaggccttgcccacccacctgcctgggaagtgcagagtggatggacgggtttagaggggaggggcgaaggtgctgtaaacaggtttgggcagtggtgggggagggggccagagaggcggctcaggttgcccagctctgtggcctcaggactctctgcctcacccgcttcagcccagggcccctggagactgatcccctctgagtcctctgccccttccaaggacactaatgagcctgggagggtggcagggaggaggggacagcttcacccttggaagtcctggggtttttcctcttccttctttgtggtttctgttttgtaatttaagaagagctattcatcactgtaattattattattttctacaataaatgggacctgtgcacaggagg

SEQ ID NO: 7 - DNA, 34999 bp, Homo sapiens
gggcgtgagaggcggggcggggccgcgctctgcttgccaatgtctttataggtcacccggaaggcacgcggaacctcggcgcggtgcttccagcagggtctctccgccactccagccccgcgcccctcgccgcggccctcgggcgtctgcgccgcagctgccgcccccgcctctttggagtctctcgcggcctcaaagcgcggcctgcgtcgcttccggcagttcccgaccgcgggcgatggctgccgctgggggcgcccggctgctgcgcgccgcttctgctgtcctcggcggcccggccggccggtggctgcaccacgctgggtcccgcgctggatccagcggcctgctgaggaaccgggggccgggcgggagcgcggaggcgagccggtcgctgagcgtgtcggcgcgggcccggagcaggtagggcgccgtgcgggcgcgatcgccggcgcgggccggggtccccggtgggtggcgcctggctctctgggccgagtctctggttccagtgccttctgcgcgccgggcccacaccccggaggcctgcctctcgcccccctcttctggggtgctctcgcggctccgtctcgctgctcggtggcgtcgctgcctcccttccgtcgcaccgcagagttcctttccgcatcacccactcccggcgggaatcggggaccctggacgcccagctccctttcccagcgcttcccgtgccctgaggaaagccgggactttgctgctgcttgttctccgtgtgatttgtctgggatctgacctttgctctgcccgaaactggcagtgaccttcgcgacaggcttccctcctgctgtcctggcctgacacacctgccagctgtttttttcagggccttgccctgctttgagaggacacccaggtcccaggtctttgtcagggggtgtccaggtagaatacacccagcccataccctctgctgccctgtaggccctttgctagttgctcaagtgttgaaagcccctgcgttgaagtaatctgccgggacttgaaacttggctttggcactgattgtctgacgtgcctaacttggtcagtccttaggaacccagtttctccatttgcaagttggatataataacagtgtagacctcctatggttaattgaagaatcaatgagttaatacagcgatacaggtagtcttgtgcctagcacgtaatgagggctcagtagatgccacttggtagcagcagcagcagcagcagcagcagcagcagcagcttcttaggttcacaatgttaagagagttttgtattaaatattgaaagaaatgtgacaatttatcccaaatgtgttgaagttttaggttcttgggcatatttgtttttcaaagacactccttagatatactagagatacaatttacacataatttttaccaacatggtggcgatttatataatgcagatctctcgacagctctttgaccgcatgatgtagggtagcaggaatcgagaactagagggagagtgtgttggatttgtacgctgctttgtctagtttctttttgaggtctctgagagcagggtctaagactttcagtcatcttttccccactaatcccgttatctagtgggtgctccatacatttttgttgtgtgaactttgggggaaatcagggagaaggcaagccagatttatttgttcctgtttcctctgcacttccccccctgtctttgaccagtgtgggtaccttgctttctgttatacaatggatgagttttggacaactgaatcaattgggacagatattgaacatgcttgtgtaactggtataagggaacatgaatgtttttgtagtaattgggagttatctttctcagatttgttttttggatttggatatgtcaggttgttttaaaggggagcacgtctatttcctcataatcctgctgccctctttattggcacaatttctattcatggtcttatcattcctcttacagactttggagctacaactggattttccagttcttactgtgttaatgagacttgtgctgtaactaccgtaactactaatcacatgtggctattgaagtttaacataattaaaggtaaataaaattaaagattcaatctcgtagttacactagccacatttcgagttctcagtagccacatgtggctagtggctactgtattggacattgcaagtatgtgtagaacatctttgttatggcacaaagttcttatagacagacagagcagttctagaaactgtagttctgtctttgaagtttaacaactcgataagctatcagtaattgagagtcagaaaaactccttttactctaaaataccgtgacacaagggggtttgcagtgattcaggtagcaaagatctttcacgtgtattgtttcgtatgactcttaagacaattctatgaggtagggagggtagataaatgggaataaaaatttcatattaagtagctggcaaaactaggactagaactcaagaagtttttgcggattttaaaaaaattttaaatttctatttatttttaaaatttcagtagttttgggggcacaggtggtgtttggttaatgggttagttctttagtggtgattttggaggtgttggtgtactcttcacctgagtgcagtggtgccatcatggctcactgcagcctacacctcccaggttcaagcgattctcgtgcctcagccacccgaatatctgggattacaggcgcgtgccaccacactcggctaagttttgtagttttagtagagatgagatttcactatgttgaccagcctggtctggaacccctggcctcaagtaatctgcctgcttcagcctcccaaagtattgggattacaggcgtgagtgaccactcccagcatagggtctacatcttctgactcttaggttccatactctttcaacttaagaattacatttttctttcgtttccgcctcctctcctcttctttggtaaacctgttaatactcttacttggcagttttttgtagggctgtttacctttaatacagaccaacaggttgggcttcttagcaaaagggcttggtctttaaataacagttattaatcagtgtgtgttgaattctactatgtgttacgtattttgcatacattgtcagaactataagattaatgttgtccaattttatagaagaggaggctgatgtaagagatttcgaattcctttgctgtaagcttagctctagagtgcttcagaagaacagcaacgctgaaacctctggctttcagtagtgtgtataaatgatggaattctttctaatgtgcttcctgtagctttagctaccaggcattcgttgatgtcaaatctctagacttctctgctgggctcagacccatacccatattgccatctggtgtttggacattctcatctggctttttcattattaaattcagcaggtctaagcttcaacttatttctgtcttccccaaagttcctttggttcctgtcttaaacctaggttaaatggtaccacctaattgtgtgagctggaaatcccaatgtttttctttccgcttttcagtttatcttatgtagatggtcactaaaaccttttggtctacctcctggatgtctgttaagtcactgcattctctgtccctgattagtttatgctgttttgataacctccaaagtggcctccctgcctctagggtattttcattctcagccattgtactttgaaaaaaatggcagttattcatgttgaaaattatgaataatatgtgggaatactagttttaaagcatgttttggctgtgaaaagaagttggagagcgcaggcccttttgaggaacattctggtacacacacacacacccttttgatgagttttaatgaatagaatcctgttttttttcccagtgttataatattagggagggcattatcccagtggggcttcagttgcctcatttgtgaaatgggatcactggacttgataactttcgagatagttatggctctgaaattatttaattctgagttttacttaaagatttgtttgatgggctattgccatctactggtagtaataagaataacaactcattattttaagttgaagagaatcttttcaagtgtgaggtaaaaattaaaatgaccaatggtggaggaataaggatctagtttttagtataatggcttctcaaattttggagggatgtttgtgagaagtgaaggaaatttaagtcagctagctgatagttaacatactatcttaaaaaaacatgtaaggaggtatttatcttacagattcaaacaaataaactttttctagtccctttgatttgtaagtatacaatgtggactgaaatgagatgtcaaatacgcagaaaactactaaacaacatctctcagcagtagtattctatgtagcactggaaaagcaatcgccctattgatttttttttttttttttttggagacagagtttcactctgccacccgggctggagtgcagtggtttgatctcggctcactgcaacctctgccttccgggttcaagcgattctcctgcctcagcctcccgagtagctgggattacaggcatgtaccaccatgcctaatttttgtatttttagtagagacggggtttcgccatgttggccaggctggtcttgaacttctgacctcaggtaatccgcccgccttggcctcccaaagtgttggaattacaggcgtgagtcaccatgctcggccatgatttgctttttagaagctcactacaaccctggtctagtcttttatggacacattcatgtttttcagagagctgtgtgatgactttttttgtttttttttttttttttttttttgagacagggccttgagctgttgcccaggttagagtgcaatggtgtaatcacggctcactgcagccctgaacttctgggatcgggtgatccacctcagccccatgagtagctggtactatgggcaaataccaccatgccttttatttttcatacacctacaaccatctcatttttatttttattttttgtagcaatagggtctctctgtgttgctcaggctggtctcaaactcctgggctcaagcagtcccctgcctcggcctcccaaagtgctaggagtacaggtatgagccaccacacttggccttttcttttttaaatgacagggtcttgctgtgttgcccaggctggagtgcagtggtgcaatcatatcccattgcagcctcttcctcctcctgggctcaagggatcctcccgtttcagcctcccaattagctgggactacagatcacatcaccacacctggctaattattttattttttgtaaagatgggatcttgccatgttgcccaggctggtctcaaacttctggcgtcaaacaatcttcccacttcagcttctcgaagtactggggttacaggtgcaagctactgcactggcttgtatgagagtaaaatagagttcatgagtgataataattgccaaatgttttataactgtgactattagggagacatatactgaggccaccaggtggcgttgaccaggtagtcattgccatttcctgtaaggtagtagagcttattacctggtaggtgggtagatatatatgcctttgatttccaaataagctttggaaagaaaagaaaataccttcggctaggcatggtggctcaggcctgtaatctcagagttttaggaggccaagttgagaagatggcttgaggccaggaatttgagaccagcttgagcaacatggtggcaccccgtcactacaaaaaataaaaataaaaaaaattagccaggcgtggtgctgggcacctgtattcccatctactctggaggccttataggcttttaaaccaattattttaaattatgttttgaaattactaaaaatactaaaggactgtttttttttccagctcagaagataaaataacagtccactttataaaccgtgatggtgaaacattaacaaccaaaggaaaagttggtgattctctgctagatgttgtggttgaaaataatctagatattgatggctttggtgagtatgaaacatttcttaaaatgcataagtgaaactgttaggtttcaaatttttattttgtggtttttttttttgaagaagtttaacctatagcatgctatgtaaaatattaacattcaggatgtgttagtgttatattcttgtttataaagaataatagagtgacaccattgttctgttctttgtacatttaaataagtcatggccagaaatctgctgtggcctcattaccttactgtttatatgtgtgatacaaagccgacggtagggagtagagttaaaagataccaggttagagagaataaatgtcatagcacagaggggtacttaaatatcttgaatgtcagctcaccttcctaggaaaggtaacttatcctagaaagtgatttatttagaaagttttcatttttagacttctgaccatatgccttaactacacgtgcaaagcctgtgttcctgcaactgcccttttacacttcctcaggcgtaccctgtatatgacctgtcagttttgttcaagcaatgcatgtttagattagcagttctcagagggtttccttgaccgttagcattagtgtcacctgggaaatgcagattctcagacactcctcccccacccaccgcccccacccccgccccagacttactgagtcacaaagtctggggtaggtccagcattgcatgttgtaacagctgtctgtgtgattttgatgcatgttcaagtttgagaaccactggtctggaataaggttcaaggagcgtatctgactctgcttctttcaaggcactgttcacattatcctttaaagaaccatttctagatcagaattaatttatctctcttctgttttcccatgatatattaaatctacctctctttgttaatgcttataacagttttcctttttagagagaatggctatctttcttattagattattagtttttgaaagactgtactccatgaggttacctgagtcacctcatggagtaggctttgtccagagttggcactcaataatatttgctgaatatctttttaaaaattttttgagacaggatcttgctctgtcacccaggctgaagtgcggtcgtgcaatcacagttcactgcagcctcgacctcctggactcaagtgatcctcctgactccgcctcctgagtagctgggactgcaggtgcaccatcacacctggctgaattttgtattttttgtagagacagtgttttgccacattgcccagcctggtcttgaactcctgggctcaagagatcttcctgccttggcctcccaaagtgctggcattacaggcgtgagccaccatgcccagccttgaatactgaatctaagtattttttgctagttttaaaataattataacaactagaatttgagtgtatactatattctagcatatgttaaatgaagtagattttttttttaactctccatttgatagttgaagaaacttgagtctcatggaaattaagtttccctggttatacatgcagcaagtgagagggctaagactcaaacctgtcttgaagtcaagatggtatatctcattgtggttttgatttgtatttctctggtgattagtgatgttgaacatttttccgtatgtttgttggccgcttttatgtctgtgtcttcttttgagaggtgtctgttcatgtctttttattttccaacttttatttagattcagggagtacatgtgcaggtttgttaaatggatgtatcatgtgatgctgaagtctggagtatgagtgatcctgtcacctaggcagtaggcttagaaaccaataggtagttttcctccttgcccctctcccttccccctctggtagtgcccagtatctactgttcccaactttatgtccatgggacccagtatttagcttgcacttataagtgagaacactttgcttttctggttctgtgttaatttactcgggataatggccttgagctgtatccatgttgctggaaaggacatagttttattctttttatggctgcatattccgtggtatatgtgtattacattttctttatccaatccaccattgacaggcacccagactgattccatatgtttgctattatgaatagtgctgaggtaaacatacgagagcatgtgtcttttggtagaattatttgttttctcttgggtatgtacccagtactgggattgcttggttgaatggtagttccatttttagttctttgagaaatctccaaactgctttccacagcagcttaactaatttacattcccaccaggactgtcttaagtgtttccttttctccgcagccttgccaacatctgtaattttttgactttttaatgatattctttatgactggtgcaagatggtatctcattgtggttttgatttgcagagtggagtattttttcatgtttcatgtttgttgaccacttgtatgtcttcttttttaaatatttatttatttatttttgacacaaagtctcactgtcacccaggctggagtgcagtggcgcagtctgggctcactgcaaccttcgcctcccaagttcaagcgattctcctgcctcagtctcctgagtagctggaattataaaggtgtgccaccacggctagcaaatttttatatttttagtagttttatatttttataattttatgattattttcaaattttatatttttagttttgccgcattgaccaggctggtcttgaattcctgacctcaagtgatctgcctacttcggcctcccaaagtgctgggattacaggcgtgagccaccatgcctgacttctgcccgctttttaatgaagttatttgttttttgcttgttgatctgtttaagttccctattgattctggatattagacctttgttggattcatagtttgtgaatattttctctcattctgtagggtgtttactttgtttttttgtttgttttttgagacggagtcttgttctgtcgcccaggctagagtgcaatgatgtgatctcggcttgctgattcacctccacctcctgggttcaagtgattctcctgcctcagcctcttgagtagctgggattacaggcactcactaccacgcccagctaatttttgtatttttagtagagatagggtttcaccatgttggccaggctggtctggaactcctgatctcaaatgatctgcccaccttggcctcccaagtactgggattacaggtgtcagccaccatgcctgctctgcccacttccccccaaccccgagacggagtctcactctgttgtccaggttggagtgcagtgctactgtcttagctcactgcacccttcacctcctgggttaaagcaattctcctacctcagcttcccgagtacctgggattacaggtgcatgctaccatgcccggctaatttttttgtatttttagtagagatggggtttcccatgttggccaggctagtctcgaactcctgacctcatgatctgcccgatttggcctcccaaagtgctgggattacaggtgtgagccaccacacccggccctctgcccactttttaatgaggttatttgttttttgcttgttgatctgtttaagttccctatagattctggatattagacctttgttggatgcatagattgtgaatattttttctcattttctagggtgtttactttgttgatagtttctttaatgtgtcgaagctctttaatcaggtcccatttgtcaatttttgtttttgttgcaattgattttgaggacttagtcataaaaattctttgccgaggccaatttccaggagagcatttctgaggttttcttctaggacttttgtagctttagatcttacatttaagtctttaatctattttgagttaaattttgtatacagtgataggtaggggtctagtttcatttttctgcatataatagccatcaatcccagcactgtttactgaatagggagttctttcctcattgcttatttttgttgactttgtgaaagatcagattttctagatgtatggctttatttttcgggtctctattctgttcctttggtctgtgtgtctaggttttctaggttgtgtgcataggggtgctgataatagtctctaggatctttgtatctttatgggattggttgtaatgccatctttgtcatttctaattattcttatttggatcatctctttttttttctttgttaatctagctagtggtctatccattttgtttattctttcagaaaagcaacttttggttttgttgatcctttgtatagatttttgggtctcgattttgttcagttctgctttgagtttgttatttcttctgctagctttgggttttttgtttttcaagttcttctaggttaattttagattgttaatttgagatctttctaactcctcaatataggcggtcagtgctctaaacttcatcttagcactacttttgctgcatcccagagattttggtatctgtgtctctgcttttatttatttcaaagaattttttgatttctgccatatggtggagccactttagctggtagaaatattttctgatctttgacagaatgggtaaaccatgctattgtttgtgtgcattggaagttgtggctgttgtgctgttgaaaaaatttaaatcttaatatctcataacagtgttaactaaactttcatttagtgatggtgtggtactgaaatatgtcccaaatcaataacattggaatggatgctaaacatgatctaacacaaaaaaaggctaaacaatcagcctgacgtttggtgctgttaatttaggtgtagatactgtaaagacaaaagtacttagaaaataggattttaaaaagacattacggtaggaatatttttaagctcacaaaaaaatcacttggtgaagggtaatggaaaacaatactggtggtctggctgtgtccacacccaaatctcatcttgaattcccacctgttataggagggacccagtgggaggtaattgaatcctgggggcaggtctttcttatgctgttcttgtgacagtgaataaatctcacaagatctgacaattttataagagggagtttccctgcacaagctctctgcatgcctgctgccatccatgtaagatatgacttgcttcttcttgccttctgccagtattgtgaggcttcctcagccacatggaactgtaagtccattaaacactttttcctgtataaattacccagtttcggatatgtctttgtcagcagtgtgaaaatggactaataaagcaaattggtacgaggagtagggtgctgctgaaaagataccccaaatgtggaagcaactttggaaccaggtaacaggcagacattggaacagtttggagggctcaggagaagataggaaaatatgggaaagtttggaactccctagagacttgtggaatggctttggccaaaatgctgataacgatatggacaatgaaattcaggctgaggtggtctcagatggagacgaggaacttgttgggaattggagtaaaggtgactcttgctatgttttagcaaagagactagcgcattttgcccctgccctagagatttgtggaactttgaacttaagagatgatacttagggtatctggcagaagaaatttctaagcagcaaatcattcaagaggtgacttgggtgctgttaaaggcattcagttttaaaaggaaacagcataaaaaagtttggaaaatttgcagcctgacaatgtgatagaaaagaaaaccccattttctggggaaaaattcaagctggctgcagaaatttgggtaaggaatgaggagctgaaagttaatccctgagatactggggaaaatgtctccagggcatgtcagagatcttcatggcagcccctcccatcacaggcctggaagcctaggaggaaaaagtggttttgtgggctgggcccagggcccccttgctgtgtacagcctagggacttggtgctctgtgtcccagctgtcccagctgtggctgaaaggggccaatgtagagctagggccgtggcttcagagtgtgcaaacctcaagccttggcagcttccatgtggtattgagcctgctagtgtacagaagtcaagaactggggcttgggaacctccgcctagatttcagaggatgtatggaaatgcctagatgttccaggcagtagttttttgcagggcagggctctcatggagaacttctgctagggcagtgcagaagggaaatgtggggttggagcccccacacagagtccctattggggcaccgcctagtggagctgtgcgaagagggccactgccctccaaacctcagaatggtagatccactgacagcttgcatgatatgcctggaaaagccacagacactcaatgccagcccatgaaagcagccaggagggaggctgtatcctgcaaagccacaggggtggagctgcccaagaccatgggaacccagctcttgcatcagtgtgacctggatgtgagacatgtagtcaaaggagatcattttggagctttaagatttgactgccctgctggattttggacttgcatggggtctgtagcccctttgttttgaccgatttctcccatttggaatagctatatttacccaatgcctgtacccccattgtatctaggaagtaactaacttgcttttgattttacaggctcataggcagaagggacttgccttatcttggatgagactttggactgtggacttttgaattaatgctgaaaagagttaagactgttggaaaggcatgattggttttgaaatgtgaggacatgagatttgggagggaccaggggcagaatgatatggtctagccatgtcccctcctatccagacctcatcttgaattcccacgggttgtgggagggacccagtggtaggtaattgaatcttgggggcaggtctttcccatgctgttctcctgacagtgaataagactcacaatatctgacagttttataaggggaggggggttccctgcacaagctctctgcctgacgccatccatgtaagatgtgacttgttcctcgttgccttctgccaggattgtgaggcttccccagccattgtggaactgtaagttcattaaaccctttttcctgtataaattacccagtttcaggtatgtctttatcagcagcatgaaaatggactaatacaattggttacatagttgaagacacaaaactgtggcagtgtacctcagtctgcaatggctgatgtttatgggtgctgaaaattcatctttacccctgccctgccccgctaccttttttttttctgtaggaaaatgtctcaagttttaaattatgtaaagctttcagcactagcatctttggtataaaaaaagatgatgggatttagattatcttccctccccaccacatcatttaacatgccgtctgtggtttttggacttaataatatcctttttttttttttttttttgagacgtagttttgctctttttgcccaggctggaatgcaatggcacgatctcggctcattgcaacctctgcctccctggttcaagtgattctcctgccttagcctcctgagtagctgggattacaggtgtctaccaccacgcccacctaatttttaaaatatttttagcagagacggggtttcaccatgttgggcaggctggtttcgaactcctgacctcaagtgatccgcctgccttggcctcccaaagtgctagaattacaggtgtgagccactacgccttggccaacagctaatgccctttctgattggtgtgagatggtatctcattgtggttttgatttgcatttctctgatgattagtgatgtggagcatttttttcatgtttgttggctgcttgtatggctttttttgagaagtgtctgttcatgtcctttgcctatttttttaatgaggttgttttttgcttattgatttaagttccctatagattctggatattagacctttgttagatgcatagttggtgaatattttctcccactctgtaggttgtctgtttactttgttgatagttttttttgctgtctagaagctctttgtttaattagatcccacttaccaatttttgcttttgttgcaattgcttttggagacttagccaaaaatcctttgccaatccaatgtctagaagagtatttccttgattgtcttttttatagtttgaggtcttaaatttaaatctttgatccattttgggttaatttttgtgtatggtgaaaggtagggagtccaagttcagacttctgcctatggctagccaggcatcccagcaccattattgaatacggagtctcttaaaaagagtaagtgctgtccgggcgcgttggctcatgcctgtaatcctggcactttgggaggccaaggcaggcagatcacttgaggtcaggagtttgagactagcctggccaacatggtgaagccccatctctactaaaaatacaaaaattagccaggtgtggtggcatacacctgtagtcccagctacttgggaggctgaggcaccagaatcacttgaatctgggaggcggaggttgcagtgagctgagattgtgcctctgtactccaccctgggtgactgagcaagactgtctcaaaaaaaaaagaaaatatatgtgtgtgtgtgtgtgtgtatatatatatatacgtatatatatatatatatacacgtatatatatatatatacgtatatatatatatatacgtatatatatatatatatatacacgtatatatatatatatatatttgcagaacaacctctgagctgcctcactctgggcacactgcctatgggatagctgtgctccacaaggagtcctacttctgctgctgctgtatgctgctgcttcaatgaaagttgctatttaacacgaccgacccgccctgaatcgtttcctgggcaaagctaagaaccttcctgggctaagccccaattttggggcctgtctaccctgcatcaattctatatgaattttagaatagtttttttataattctgtgaaaaatgatgttggtagtttgataggaatagtgttgaatctgtaaattgctttgggcagtattatttgcttatttttctgatgaggtattgtttatttttataggttagcaaaagctctttaaatgtcctatttgataaaaattgtgaagatgaaaattttaaacatttatttaaatggcttccaactgctattttacatgaagttacatattctcaaaatagtgtaaaatgctttttgcataaataatttgtgtggattgctttatattaatttcttctaaattaaaacataagtattatgatcttaatacttgaaagtattcttttaagtttttaaaagtatttttttcttcatcacttgtgactatatattacagtacagttttttttaaaccgcaggtgacaactattacaaggtcatgaaatcaatttagtcactcccaactagcattttaaagaaatcaaaaagaacatataaaaacatatcatcttttgcaagggtattatcttaggaaatgtttatttagctattttacaagtatatatgtactgggtcatgatgtaaaatgaaattcgtactgtgagtcacagttaaataaagttttttctgaaagtcattggttggaatggaagaatgtcctgcctgggcttctttcccagctgtatccctttttcagctttgtgaccttgggttgggtatctaacctactcataactcatcttttcatctgtaaagcagggataatattaatatctacctcataaagttgctgtaaagatcaaatgagtaaatccaagcaagtcctaaataaatattagctaatattgttaacataggtattaatacagattcattgttcattatagcaaattttaaaaatacatttaaaaagaatttaacacttcatatcatcacacagagataagcactgaaataatcttttttccgaatacccaagaaatatagaaaatttaatgtaaatttaaaaattctgctggtatcatagaaattcgcgtattcagactcagaagaaaagctttaaagatcaagtatcctgacatgtccacaaatctttgtatttaaagataagcttgagataagtaagctaaactagattcaccaaagacagagttaagcctaagcttctttctagaataaagatgagagaaatgaaatcaggaagggtgcaatgttatcattataaagaagagcttattaccacaacattatgggggcagctgtttcattaattcctaaggctgaatgcaggagcccatctaaacactgcatttgtcataagtcatacagatgaacaccgtactccaaacatggctgaccgaagtacttagtttctttacagtttctccctgggtgatctcatccgttctgtgaccttaaatcctttctagatattgataaactcttaaatttacatccttagctcagacctctcctctgagccctgatttacagatctaacttcttgctttacatcacttcttggaaatctaacatatttaaaacagcttttgccttttttcctcctgatgaaacctgtccttcctcgagtctttcctacctcagtaatgagcaccacccggctgctcgaacctgaaaccgtagagcaccattccttcctctttcttcccaacctgacatccagtccatcggcacctcctgccagttgtgcccccaagattcgcctccagcatgtcctgttggctccatccctacagtcggcacgaggggctggccagccactgggcgcctggagctgtgctaacctgcttctgctctggagtttaacagccaggtaatttgtcctaacagaaatcagacatgtcagtcccctgattaaaagccatgagtgggccaggcacagtggctgacgcctgtaatccctgcactttgggaggcctaggtgggcagatcacaaggtcacgagtttgagaccagcctgggcaacatggtgaaaacccgtctctactaaaaatacaaaaattagccaggtgtggtggcgtgcacctgtaatttcagctacttggggaggccaaggcaggagaattgctttaacccaggagtcagaggttgcagtgagctgagattgcaccattgcactccagcctgggttacagactaagactccatcttggaaaaaaaaaaaaaaaaccgagatgggcggatcacgaggtcaagagattgagaccatcctggccaacataatgaaaccccgtctctactaaaaatacaaaaaaaaaaaaaaaaaaaaaaaaaaaaaacccagctgggcatggtggtgcatgcctgtaatcccagctacttgggaggctgaggcaggagaattcctcgaaccagggagtcggaggttgcagtgagccgagattgcaccactgtactccagtctggcagcaaagtgagactccttcaaacaaacaaacaaaaaaccatgagtgtcttcctttgcacataggataaaatctgtattcccagccgtaaaaggctctgcattatctggccccatctgccactcttcctcttttttgtttttttctcattgttctttgtctcactttggtgatactggccttttctcaagagcttgaactcacccaaaattcctacctttgagactttgtatatactttaccctctccctgagacacatccctctctctcccatccccaaaatttagcttttcatctatcaaatctcaatttatgtacttccttagcgaggctttgcccagccacccagtccaaagtagtggttctcttgttaccctgaacccattattctctttctcagcatcttgttcacttgttttatagtatttgtcacagtttagtaattatgtatttcttgtgtatctttcccaatagactgcgatgagggataaagtcattcctgtttaattcctcattgtatacgaaatgaagtaataagtgaacacatgaataaaaagggacagtcataaattttggaaacagttcaaacttataaacattctcattgccaacttttatattaatatagatcttttggatgatgcaggtacctgttttcagagtgtatcataatattctgtcactagggggcagttacacacctgagattcaacttacctagtttactctcaagacatttttttcttcaatattacctgttttcttcatgtgtctgttttgagggaaattatacaaattggaagatcctgattgtgtttgtataagtttatttgtattcccctcatgcttgagtccctattgatataatgtatttctgactatgctagatcaatctttaatctagaaaattagattttatatttacacataatttccatttctaatatataatattcccacacagccatcctctagatttttgtttgggaaaggggttaggtgtcggggcaggcaattgtattgtcagcatcgtagtagataatacaaaatgatcttaatatgagatgcacacacacaaaatgtcttttcccgttggcaaacactcaagttacatgaaaggaaaggagcagagcagtctgcagagatctgactttctctaggaattaatttcacagctacaacttctgaggatttgcccaagtacttactatcattattcctgttttaaaaaaacaaaacttggttcatgagttcaccaaccttgaaattagtaagcatgctttactattcttcatgtcattttatatgcatatatttgaaattgtgcagattaacagtattgagattcttactctagcaaaatcagaagcattgcagaaaccaaaactgttgtcaggaatcctgtaattttaagctggcaggctgtgtgagttgtaaattttacatttgttactgcagctaaagatggaccattttagctaataaacaaatccctgccatcctttgtcagcaccatgtgaaccatgctgtttatagacatctgaatatctgtatgattttcttgactatggtgatgatattttaaactgtggttataatttaaaatcatttttaaagcctgtatcagtttcagccaagcattaagtgctaatactgaaaaatgtatctgaaaatgagttattttggaatagaggttagatataacaaaatgttaggaagaaagccaaaaacctgtcatgatacatactactgttaatttaggagaaagcactctgaattgttagccagtatgtaaacaaaatcaaagcagtactaaaatgtatatacttttaagttcatgaaaattgttgtataaccaagccaggatggtggctaaaatgctagcaccaggggctaatatcagtgttgctgtaaggtgttcctaaatcaggttattatctgtgctaaggcatgaagtatgttattattattaattttaattgacagatcataattgtatttatggggtaggtacagtgtgatgttttgatacatgtatacaatgtggaatgattaacttaagctaataaacatatccttcacctcacttattttttgtgatgagacatctgaaatttactgttagtaacttttgaaatacacaatacattattattaactgcagtcaccatgctgttgctatagattttttaaaattaattttttataatattttgagacagagtcttactctgtcactcaggctggagtgcagtggcatgatgttggctcactgcagcctccacctcctgggttgaagtgattcttgtgtctcagccttcctaatagctgggattataggtgagcaccaccacacccagctaatttttgtatttttagtaaagatggggtttcaccatgttggccaggctggtctcgaatacctgacctcaaacagtttgcctgcctcggcctcccaaagtactgggattacaggcatgagccactgtgctcggcctgtgctagagatcttaaacacaaattcctcctaactgaaactttgtagcctttgaacagcacatgctcatttcatttccttacccccactcccatctgctggtaactaccgttgtattttctaaggcagtggcccccaacctttttggcactagggactggttttgtggaagacaaattttccatgggcaaggttggggtggggatggatttgggatgattcaagtgcattacatttattgtgcactttatttctattattattacactgtatcatataatgaaataattatacaactcatcataaggtagaatcagtgggaagccctgagtttgttttcctgcaactagatctaggtcccatctggaggtgatgggagacagtaacagatcatcaggcattagattctcataaggagggtgcaccctagatcccccacatgcacagttcacagtagggttctcatcctatgagaatctaatgcagctgctgatctgacagaggtggagctcagacggtaatgtgagcaatggggagcagttgtaaatacagatgaagcttccctcacttgccctctgctcacctgctgtgtggcctgtggctcgggactgctgtaagacatgatgtatttttggttatttgaaaggtggacatagtaatgaaaagaattttacatcaaacatttgttctacttaagtatattttaaaacaaaaatgtttgaggattttagatttttaaactttaggaatccacttttctattttgtttctttgagaaaataattcttgaaatatgagacttgtacaatttccaaaatctttgagaatgcatttctcataaaacatcactttgtgtttacatatatgtgtatatccatgtatatatatacatgtacatacatgtatacacatagacatacacattttccctgttcatttacttttatatagccaaccacttataaagacactaaaagctgacagccaccaatattactctggggctgtgtatataataagttatataacttttgcacctcattccttcatatacatcatatattagtatacccatattgtgatcagctgcaagttttagccttgtagttgttgtttgttacttttatatcctttattcttttatagttttataggttatcttccactgtttattttgtagggttctctgtgtatatgaaaagccaaaaaaaaaaaagctccccattttgtgaatagcttttgtttccataatctattttcaggtcagctgcttgttatttggaatttgttttcccataaaaaataatgttggctaaatttttgagccaacacacagaacctatttcttcacaactgacttaatcaccatttatagcttgttttttgggataaaatgcattgcaccttctaactcttgtaattgtagctgctgctgcttttcttctacttttttaaagagacagggtctcatgccagtcagaatggtgattattaaaaagtcaagaaacaacagatgtggtgaggttacagagaaatatgaacacttttacactgttggtgggaatgaaaattagttcaaccattgtggaagacagtgtggtgattcctccaagatttagaactggaaatacaatttgacccagcaatctcattactgggtatatacccaaaggaatataaatcattctgttataaaaatacgtgcatgtatatgttcattgtagcactattcacaatagcaaagacatagaatcaacccaaatgccaatcaatgataggctggataaagaaaatgtacatatacaccatggaatactgtgcagccgtagaaggaacaagatcatgtcctttgcagggacatggatggagctggaagccattatcctcagcaaactaatgcaggaacagaaaaccaaataccacatgttctcacttacgtataccacattttctttatctctttatcacttgagagatatttgggttgtttccacctcttggcaatggccaattggtttttgacaaaggtgcaaagcaattagtgaagaaagggtattcttttcaacaaatgatgttgaatcaattggatattcatgtgggaaaaaaaaggtgcatcaacctaaacctcacatcttataaaaacatgaatgcaaaattgacttagatctaaatgtagaacttagaactgtaaactcctaaaagaaagaacaagaaaaaatctttaggacctgtgggtaggtaggcagagaattcttagacatgactggaaaagaatttatatataaattcttatatataagaaaaataaattagagttcatcaaaattaaaaacttttgttcttccaaagacactgttaagggactgaaaagccaaactacagactgggagaaaatacttgtaaatcacatatccagtgaaaggacttgtatcccggctatgtaaaaagctctccaaacttaacagtaagaaaacaacacaattaaaaaaatgggcaaaagatatgaacagacacttcaccaaggagaatttagagatggcaaataagctcataaaaagattgaggggcatctggacctgaacttgtatgtgtgaatgagtttgtgttgtttagagtttctcctagaggcacaagagactaatggtgatgtcatactcccaagtggctttgggaaaaaaatgaggcaaagttaaaaaaaaaaaaagatattttacacctttaatttcttggagaaaatgtgaatgaaagtcacaatgtgacaccaccagatacctactagaaacaaaccatgggacattcaaacagtggaatgcttcttagcaatgaaagggagcaaactatagatacatgcaacacattggatgaatctcaaaggcattgtgttgagtgaaagaagccagtttcagtcaaacactgtatgattctatttatatgaacattctggaaaagactaaaccacagtgatagagaacagatcagtggttaccaggggttagggatgaggtagactgtgacaacaaagcaacagcaaaagggaattaaaagttttaggctgaggaagctgctctgtaccctcagtgtggtggtggttacacaagtctatacatacattaaaactcatagaactggccaggtgcggtggctcacgcctgtaacctcagcactttgggaggctgaggcaggcagatcacctgaggtcaggagtttgagaccagcctggacaacatggtgaaaccccgtctctgctaaaaatacaaaaattagccaggcatggtggctcatgcctgtaatctcagctactccaggaggctgaggcaggagaatcacttgaacccgggaggcggaggttgccgtgagccgagatcgcaccattacactccagtccaggcaacaagagtaagactgtctgaaaaaacaaacaaacacaacaaaacaaaaagcctcatagaactgaacactgaaagagacaactagtaattggaggacatagctctcatgaaattggcaatattttatgagataaagaaaacagaaaaggagtaactttttttttttttcttaaatagcctcttgttcttcttacagttttaggctcttttttatacccaaatatttaccttatttttgcaggtttttttttttcctcctaaataccctttttggttaggtgtctccaatattctctaaaattctttaatttttaataaaccgtataggttaaatctcaaaacaaactctagaaaactactcatctgtcttcttatggatttttgaaagattgaaagtttctttttacttttctattttttaaatttttctttgagccctgaccatggcaaggacagaatagttcataagtgctatccatagggtcttggaaacccttggtacagatcgtttctgtagtgatagttgttctaacacagtctgaccgttagctttctctggtttagtgttagctctctcacataggctggtttcattctgagtcttatagtttctattatatttgaacttcttcctagtacaaagaataacaaaggataaattgttggcaagtttttttggcagaaaaggttcgaaaaggaccataaaatagtgagggatcatgaatgtgatgtgttcatttaaagaataaatacgggactagaatgtataatgggaacttagtgtgtaggcaccaaaagttaatctgaaaatattcagcatttttcaaattcttattagaatagtctcttcagcgctgagcttagcaacttaagcaagatgtggaaataattgccaaggttcctgagaagagccatgaaaatttaaataagagaatagaataatacctttaagagaaggttaaaagaactgaagcttcctagggaagagggggagaatttgaagcctatgaacagctagaacaggttggtaactcttcctttcgactggctactggtacaaaaagcaatgtcctttgtttttcaggagggatttgttggcatatgagccttttatctccatttaatgtataagtaaggcaacttacattattgtatggcggtacaataattattagttgcctacagcattgggaaacttaagtcaaagtcataactcatctctaactagtggtatgaccttagtccatttctttaacttctggggcttaattcttaattcctcttatgtttacaaataaagttgaattactctaagagtttctgtaactttggataataataataatgtttaccaacacttacatagtacatactatctgccagtcatggttgccagtatatatattcatatatattaagtatacagtcatgtgtaattcttggaactactatgtgaggttagtatagttactcttgaggaaactgagacatggaaggtaaagtagcccaaggtgacagggttagtaaaaaggaaagctgtggttgaagggaggaagtctggctaacagcccatgcccctaactctgaacttcactatatggtctccctctcccataattctactgttgctttgaattggatttaataaaaatgaagatttagagaaacttcacgatggtgtttttttgtttttgttttgttttgttttgagatggagtctcactctgtcgcccaggctggagtgcagtggggcaatctcggctcactgcatcctctgcttcccaggttcaagtgattcttctgcctcagcctcccgagtagctgggattacaggtgtgcaccactacacccagctagtttttgtatttttagtagagacagggtttcactacgttagccaggctggtctcgaacctcacgtgatccatctgcctcggcctcccgaagtgctgggattacaggtgtgagccaccgtgcccggcctgttttttttttccttacggtaaaatataaataataaatgcttaaattataaggaaggaacaactctagttaaaatgatccattcagaggaaaattaagaaggttactagttgttaacagtggttgtgtatatttcatataatatttagtgaccaaaagagaatataaatcaaactgaagttactctgaggactctatattctttgaaattgtacagtggctttaaaaaaactgtaaaaacaaacccgaatcactgtttttaaagtcagatttaagcagactgtgattctgcacgcctctgttgtcaggtcctcccctgggatactaatgtgttctggatgccatattttaagaaaagcccaactggcctgagggatgggatttagaactgtgttatgtaagaaacagtggaaggacctagtggaaggacctggggatgctcagctgggagaaggaagaatgatctcaaataaatgaaaagctatcctttagaaggattaaactccatgggatagcgttggaccagtaggtgctagttacagagtggcagactttagcttggtagaagccagccgaatgcaaaattggctgacttatgtggtgtcggtttctttgtcaggagattttcaagtgaaggctgagtaataccaggaaagggatgttacagagcagattcgtcctggtttagttggacaaggtggtgttttagttctctcatcacagtgtctggcgtacgatatgtattcagtaaaccactgttaaattaatgacttaaaaaatggaacaggataaatattctgattatttaagaccatagtgacttattttaaaatgacttgattctgtccaaattacaaggagagattgagagggaagaacatttaacttaatttagctataggtttgattgctttctagttcctcttatataccataactttcatcgctattatgtcagtaattactatgtaagtttaaaattgcacaaatttttatatgtatgcatgtctcagcttattaacttgtaagctctctattaggactatattttcataggtattccttcacagcaccaagccagaacctttgtgaaataatataacgtgagggatttcaaactcatgcgtgtgtgtgcatgcgtgtgcatgtggcaggagatggaggcttgttgcccctgttctgttcattttcacctttcatttatgtattctttttttttttttttttttttttgagacagagtcttactctgtcaccccggctagagtgtaacctcagctcactgtaacctccgcctcccgggttcaagtatttcttctgcctcagcttccctagtagctgggactacaagtgtgtgccaccatgcctggctaatttttgtcttaattttagtaaagacgggatttcactatattggccatgctggtcacgaactctgacctcaagtgatctgcctgctttggcctcctaaagtgctgggattacaggtgtgagccactgtgcccggcctcacttatgtattctaatgctgattctaacatttagaagcctttactgaaccaggtatgaatcgtctgatgtagaagggactatgttcagtgtttgttgcttttgtcaggtgcatgtgagggaaccctggcttgttcaacctgtcacctcatctttgaagatcacatatatgagaagttagatgcaatcactgatgaggagaatgacatgctcgatctggcatatggactaacagacaggtaagatttttggactgcttcaattgtaataataatctgggaacatagatgttgtattatgttgtctatgtaagaccagacccataaatgtaatagtgttctaccaggttaaataacagtcacagattttgagtatcagatatgtggcatttctctttgttttcactgttctacagtttagaccttatgaaattttacaaaagtaaaaaaaattaattggaagtataagttctagatcctaacacctcttctttagtctctttttactccaggaactaatatgtatcacaactgaatggaggggttaaatctaatgcttttatatttgataattgaacacaattataatggaaagtttcacctattagaacagaatttttaaagaaacttaatatataatagtaattatgttaaaatgaatagctctttttctaagtgtaccttaaagtaatcagagcttattcttgttattaattaatagttactcttaaaagtggtgagatttacagtagcaagtgacatcaagtgatatcttattttttaaaaaaattatctagtcttttgattggagtcaatgaaggtagctagctgatatactatttcaaggggtaagataatgagggcatattacttaattaaggttggctttgtttaactctagtttggtgaccttaatgacaaataattttttaaaaattaaagatagtaataatagttttatttcatgtgtattatatagctacaattttgttatacacttttaatataaactacctcatttaatcctcacaaacattttcaggtcatttgtatttatttagagaagaagaatcattttgttccttttatagttcatttccctcttggtggatgtgagactgataaccctgggaagagaaactggtgaaatagtatctctttggacaccaaagcagagtggattgtggctactgtctgcctgtcctctcacatcttcagtgccgtgttctctatgagcacctcctttcttccccttaacacagaaactaaatccaatgactgtattagtttggttctgagaattgtgtctcttaataagagagttaaatcatagctaactgcttgctcttttatacagttacaatttgtagatgcctgtaatagataatattctaattgaaaagaaagggaaaagggagagctacagttagatacaaaaggtctataataaatgtaagctagcaagagtattgatgataaaatttccaagttttacagctacacaatagagagcaaggaatagcttttatggtgttttatagctggtattcttaagtacacagcattttagtagaaatactttgtgggaaagagtataatgggtttcacaggtagcatttacaaaacacattgacatatttggaatggaaagaattttgctcaaagctagtaaccacatgtaaacttatttttagggtatcagaaagtttcagaaaaagaaataaggaaattcagccttttagttcatatacttactttaaatactatgtaaatgtttttaatttttaagcaaaaacaccatcgtttctttttttttttgaggcagagtcttgctttgtcacccttgctggagtgcagtgacatgatcttggctcactgcaacctctgcctcccgggttcaagcaattatcctgcctcagcctcccgagtagctgggattacaggtgcctgccaccatgccccgctaatttttgtattttgagtagagacggggtttcaccatgttggccaggctgtctcgaactcctgacctcatgatctgcccaccttggcctcccaaagtgctgggattacaggcgtgagccaccgtgcctggcttcaatgttttattggttgtccttaaccttgattgttgatggatggatggatgatacatggacagcctcattgtttttttcatactggttacctatctcccttttcccattaaaggagcagccatgtcttattttaccattgtatctctaatgccagattcacagtagaggtcaccaactgcttgcggaattaatagttgatggaaagggagattcaggaattacctgtgagtttacattggatgattgtaattgctccctgccaccagtttgcatgggtaatctacacagaggcctcagattccttatatgtaaggtgaggataataatagtacctacctcacagtattgctgtgtggagttaatgaggaaatatatgtgaagctctcagaacagtgcttggtggagaaagcattcattaaatggtagttgttagcattgtaactaccatcatatcgacttatctattgggaacttactgtaatgcctaggcacttaagtattatttctaaccttcagggttaggcagtactatcaccatgttgtaggtggggaaacaaggtttagttatcacggatttgcttaaggctgcacagctagtgggtaacacccctgatttaaatccagctgtgttgggccccaaagcctttagtcttttactatttcaagctgcttctctgagttgaaaaccaaaccctagaactaaagtaaacctaatacccagtatattttcaccatcagggatatgtggcaagagtaactggagaaaataccttccaggtttgcagaagtgtcaaaatgttgtgggactcaaagtgtgaaatcaggggagccttgttgtttgtctccttctctagaagtatgagacaccatctatactggtggatcttggagccagagatctttaaggaggtagaagaagtaggagagtgagaaactagccacagagcgccactgccttattctctagactgagcaggagctttttgttccgtctctttctgtgttcccataacagatttattgttcttctatcaccacacttgtggtaccctgccatgtttcactgataactgtttccatctctgtttcccttactaaagtaaccgttccttgaagaccagcatcatcttgctatctgtgtatgaataccaagagtaaccaacagactctctagagctcactgctgtcttaacgaatttgtccaaattggcttgccactttttctctcttgcagacagagcttaatgcataattgagtattgtgaaggctgtttccaattctacaaataaagaactcttgatagaggggattttttttctattagtaatcagtatttctcatggttaagcacactcctttactccaaaacttcctggtggttcctccttgctcaccagtgaaacacaggccccttaactgatattcacagctgcctgtggctctggccgcttttctggcccatcattccccttgtccttgtttacgctgtgcagcaaccaagctaaaacacccatcttgctttaaatgtgacttgagcttctttgcattgtgttgcctttgcctcacatacttttctcctttatcttgtactaaatagtaaatcctacctatcctccaaagcccattgtggacaacaccttctgtggccagaagtaagggctttcttcttagacctctcagagccatttggctttctccctcggtggcatttgccacagtctcacatgttaactatctgaatgtgtctcatctcatccctttgattgaaagtttactcattaatgctggcattagcaaccaatcctcacagcagtcctgtgaggaattctcctgctcatcttgaagattaggttaggaaactaccatttggtgaggttaagcaagttgcctgtgaacatggtatattaagtgctggattctgcactgctggtctctttggctgtaactctgatgctgtctctttagtgcatcccaatgcccagaaaataagaagtgttcagtaagaaagtgtggagttgatttgctcttcctcattgacatttagtgttgtgcctttaggtgctcaataaatgcttcatgagtacattaataaaaccaagacctgaatatcagatttcatcaaattgaagacatgtcaattgtaagattaacatttctttttatatgccactaaggaagataaaagcactgctaattcaaatatggcacagtcttatcacttaacatattttctgaatattgaaagagttatttagacttatctagacatagatttgaattatatatcactgctaagaaaagaaaatggctgagtgcggtggctcatacctgttatcccaacactttgggaggctgaggcggatagatcacttgagcccaggaggttgagaccagcctaagcaacatggtgaaaccttgtctctacaaaaaatacaaaaattattcaagcatggtggtgcatgcctgtagtccccgctacttaggaggctgaggtgggaggatcaccagggcctgggaggtggaggttaacagtgagctgaaatcatgccagtgcactccagcctgggtgacagagccagaccctgtcttaaaaaaaaaaaaaaaaaaaagaaggaaaataaacacaaaataaaattagtagtaattctgcaaaaaaaaaaggaaattagtcattcttaaaatgacaaatatttattaattccaaatttacaccctgctttctttctgtattcttcttcattttcattttgtaatctttttagactattttgaaaagtaggtaaattcgacatgtgtacttacatactttgcataactaagttgaagagacccctgtatgaatattgtcaccaaatctgtagctgtgacatgaccattacctgacagtgtagcagtgattgtaagattccattgattttaagatgcttcttgatttccagagatggtaaaaatttgagaaaaaatatgctcttataattgatgacttaagtctatgtatttattccagatttcttcttttaaaggctttaaaaagtgtagctttcttttatagtctgtgtggttttaattatctaggaattgattaatcattttcttggccttgctaataacctcagttctccaccattgtgccttctgattgtttccttgcttgtcagctctttgaccaaaaagtagtggtctggtgaaacagttaatagataataggaaccaaaggctaaaatgaagctttggtacaccaagtttattgtattcatatttaccttttgttattctctagttgatagggttggttatatctgttttgacataaaggaaatttaaaaggttaataagttccctgactgctttgggtaagaaaatataaagactatcttaaacaactgcattgccttgtgaatatatatacgtaatactaaaccataccttcccccttttccatacagatcacggttgggctgccaaatctgtttgacaaaatctatggacaatatgactgttcgagtgcctgaaacagtggctgatgccagacaatccattgatgtgggcaagacctcctgaactagaacaaataggaatattttcatggaattttacctatttttataattattatttcttaaagtgattaaatgagaacatggatgagtggacttcatattatgactagctttactattttaattcaccttgcataactactgaattttgtcattcttgaaagtatgcaatttttattttggttatattacaaaaatgtcaatcaaatattaaaaaatagttaatgtgatagaaaaaccttacatatttttttcttatgtttgtttagcgactttagcaaaatgttttcatataatctcatctgtttacctagaagataggttaaggaaatatattattattcctgtttgatgtgggtgaaggcagagatctaacctggcttgtttagggccataccactaattagaaaatctgtgctagaacctgtgtcttattcctataagctatgtgttcagactgaaactggagaaattatgactattttatttatagtagtagttaaatctgaatgtgtatggacaaaaatatttaattgctcagtaaactgcttaacttcaaagatagttattgaccttataaataaatatttcaaaattttgattcggaagactaagtctggacgtagacattataatgctatcaaagaagtttgatctctgttttgactaaactagaggaaaaatgattggatgtgtttattcttttctaagcagaatggtttaactttgtactctttgaaaaataatgctgatttataaatctctgcctataacagaatggaaaccttatgaatgaattgtgtttctctgtcctgagctggagaagggaatgagcaggctgacacgttgcacagccccaggtggcgccattctctcacgcaaggatggggctgcagggtgagcagcgtgggctgcagtgtgtcagtcccaggagtgagggagtggcaagcaccacagattaccacgtatgtgtggaagacattcgtactcttatctttactataaataaattcataaaagttaacaaaggggtacacagtatggtctttggaaatataataaaacatcaactaacttggactaattgtgaggaagagcagaacaaattagtagaaagaggttataagacaattgagttagcttcatgtgtattattgcagcttgatcatttatataaatatttgtctagtacaatgcttgacatacagcattgtgttatgcccattggggacacagaggtgaacaagacaaggaatgccatcagggaattcaccttttattaggaaaatataaaatatgtatgtatgtgcagataatttgcttgaactaaactgactagttctgctaaataagattttaaactaattcatatgtaaaaagtgattaggaagaacttgaagtatcatttgatgcttaataactattgagtagttttttttttttttttttggtggggggagcgggggacagggtcttactctgtcactcaggccagagtacaatagtatgatctcggctcactgcaacttctgcctcccagtttcaagggattctcgtgcctcagcctcccaggtagctggtactacaggcacggaccaccacgcctggctaatttttgtattttttctagggacagggttttaccacgttgcccaggctggtcttgaacttttgagctcgagtgatccacccacctcagcctcccaaaatgctgggattacagatgtgagccaccgtgcttggccataactattgaatgctttctatgtggagagtgcttgtcttaattttctgttgctataatagaataacacagactgggtaatttataaagaaaagagatttatttggatcatggttctggaggctgggaggtccaagagcatggtaccagcatctgcttggcatctggtgacagctttcttgctgcatcattacatggtggaagggcaagagaatgcgagtgagagcaagagggcaaaatgattatccttttatcaggagcccacttctgacataactaacccacacctgagataacggcattaatccattcatgaggtctctgctcttaaaggagatcacctcttaaaggacccacctttcaatgccattacactggcaatttaatttcaagatgagttttggaggggacattcaaaccatagcagtgctataattttaaagtacttcaaagccaatttattctcttaattagcttcattattcttgtctttgtgtgtggattacctaaactctccttccagagctactttaatgattatattcaaccaaagcactctaaaatttagagtataaattgtcttatatttcaaattagaaaagttcaaatgaagtttaattgtgttattttataaaaccttctaaaattattaaatggaggatataatcta

SEQ ID NO: 8 - DNA, 3299 bp, Homo sapiens
aggcgcggttgtgagtagtaccgggagtggggtgatcccgggctaggggagcgcggcggccgcgatcgggcttagtcggagctccgaagggagtgactaggacacccgggtgggctacttttcttccggtgcttttgctttttttttcctttgggctcgggctgagtgtcgcccactgagcaaagattccctcgtaaaacccagagcgaccctcccgtcaattgttgggctcgggagtgtcgcggtgccccgagcgcgccgggcgcggaggcaaagggagcggagccggccgcggacggggcccggagcttgcctgcctccctcgctcgccccagcgggttcgctcgcgtagagcgcagggcgcgcgcgatgaaggcggtgagcccggtgcgcccctcgggccgcaaggcgccgtcgggctgcggcggcggggagctggcgctgcgctgcctggccgagcacggccacagcctgggtggctccgcagccgcggcggcggcggcggcggcagcgcgctgtaaggcggccgaggcggcggccgacgagccggcgctgtgcctgcagtgcgatatgaacgactgctatagccgcctgcggaggctggtgcccaccatcccgcccaacaagaaagtcagcaaagtggagatcctgcagcacgttatcgactacatcctggacctgcagctggcgctggagacgcacccggccctgctgaggcagccaccaccgcccgcgccgccacaccacccggccgggacctgtccagccgcgccgccgcggaccccgctcactgcgctcaacaccgacccggtgagaggccgggcgccggccgtgggcggacgccgcgggggatgggaggttggtggcgtggtggcgggacgcgggcgctcaccgtcctccgggcaggggcgggccaggaatgacagccccctccccctgctcctccgggctcccccgggccgccagcagccggccgggctcggcgagcgcgggtccgggagaacgcgcagggcgggactcggggctgtgggcgccctgggctgtcaagtcccgcctgagcccggaggggcccccccggctacaggctggggtgggggcgtcggcgcgccagcctgatttccgaggacaatccaggaccgtgtcgagcgcgttgtttgcgcctgctaacctttcccttggtgttcggttgctgttccaggccggcgcggtgaacaagcagggcgacagcattctgtgccgctgagccgcgctgtccaggtgagcgcgcatttcccgtctcgggtggccggtcaccagagacgcccgtccccgagggcttccggggccaggcaccgcggtgttctttgcccccagcgtttctgagagcaaactcccaaggaagtaaatcccctctctccctgccacctaagtagcaagtaaacccgtacttagccttagaactcgaggttcagtctcggtggagacgggtcagcccttgtccccgccgtccccgtgttttttctggtggtcagcgggctcttctgccttccctagttcccgagggagggcaccctcgtgggcatgggagctgccccggtgtcctcccgtgcagtctgtcacccacaaagggggacgcgggcagggcgccggagtgggtcccctctccgggcttcccgagggccgcagctgcctgctcggcgcctggcccggccgcgggcgggtgttgtctgacctggtggtttgttttgggttgttgatcaagcatgtcttgagtttggtcggtggcgccagttagtctgcagcgagaaggttcacacaccccctctattcattcctcttccacaggtgtgcggccgcctgagcccgagccaggagcactagagagggagggggaagagcagaagttagagaaaaaaagccaccggaggaaaggaaaaaacatcggccaacctagaaacgttttcattcgtcattccaagagagagagaggaaagaaaaatacaactttcattctttctttgcacgttcataaacattctacatacgtattctcttttgtctcttcatttataactgctgtgaattgtacatttctgtgttttttggaggtgcagttaaacttttaagcttaagtgtgacaggactgataaatagaagatcaagagtagatccgactttagaagcctactttgtgaccaaggagctcaatttttgttttgaagctttactaatctaccagagcattgtagatattttttttttacatctattgtttaaaatagatgattataacggggcagagaactttcttttctctgcaagaatgttacatattgtatagataaatgagtgacatttcataccatgtatatatagagatgttctataagtgtgagaaagtatatgctttaatagatactgtaattataagatatttttaattaaatatttttttgtaaatattatgtgtgtgtttttttttaatctatgggaatatttcttttggaaaatcatttttcagctcaattacagagctcttgatatcttgaatgtcttttctgtttggcctggctcttaatttgcttttgttttgcccagtatagactcggaagtaacagttatagctagtggtcttgcatgattgcatgagatgtttaatcacaaattaaacttgttctgagtccattcaaatgtgtttttttaaatgtagattgaaatctttgtatttgaagcatacatgttgaaaatacaccttatcagtttttaagtacagggttttatagtgtaatatatacagagtaagtgtttgtttttgtttttcaactgaggtcaaaatggattctgaatgattttgcatatgggatgaggaaatgcttggatccttaaggagtttacgaaatctgctgttttatcaaagtgaaaaaaaattgcttattactcttcattttacactaaagcttaatgtcactaagtttcatgtctgtacagattatttaaatcatggaaatgaaaaaaatgttctctgcttgctaccaaaggacaaactcttggaaatgaacactttctgctttccttcctccaaagaattaataggcaacagtgggagaaaaaaaaggcataatggcaaatccttcaagcagggataaaagtcgatcttcaaacattaacttaagcagaccaaaaattctgatgaccgcatctagattatttttttataaaaatgattttcactatagctatgttacgctaagctactgtccaatctcttgtgatgtgtaacttttacatgtgaatattaaagtagatttctctgtcttgta

SEQ ID NO: 9 - DNA, 53213 bp, Homo sapiens
aataaagcctaggccaaactgcacaaatcaggtagtctctttatgtcattgcttgttctctggttataaatgtagctcacctcatcggaggtgggggcattctgaaccatcttcagtgtagagggctgcttggttctagaatccttttcttgctcaaataaagtttgttaaatttaatttaacttggacttttctttaacagattgacccagtcgacaggatctgaacttccagtgaccatcccaggaacagaaagcaactgtgtaagtgccctccagggcccattgagcccagggatctcttttctgggcctgaattgctgggtgagcctctctctgggattctaacttccacttattttgtgttctgagctctccacgtttatctcagcgacctttgttcctttttctctctctccttttttttttctttcttttttctcctgttttactgaattggatttcacttaagaggccaggcatctgattaagttagagtctgaacagggttcaaaatcaaattggattcaacagttaactagattggatccagttaaaggccttggggtaggtaattttgatcttttcggcatttgaatccagggttttgtgcttgagagagcatttgagaatcatgacagaaacaggacccagtcctacagggaggcctcagtctgactgggtcagacagaactcaactgggctctgtagataggtagagttagcctttctaaaggtaatctaaaattaaagtggccacagtggtgacatttaatttggacagaattgtttacttgtgaggcatattcagaaaaaacagagatcagaaccacccccccaaaatactgggatgtattttttaattggtactgggaggcacgcaaaagactaaattaatccaaattgcctccttaaaagatttctttgcaaaaggcaaacaaaaagcttaagcaacagactaaggacatgaagaaagaggggtgcagtttgaccgaattaaccctgttttgcttcctacatgtttttacctcaagtttctgaatctgttaaccttttggctcaattacctttttgccagaaagagctaggaggaattgttgaaaacctcttacatttaattcctaatagctaaggtatttctgcacaaacaaaacaaaaaaacctccaaaagaaaacaaaacaaaacaaaaaaaaccacacctgattggtctgttacacaattctgcagacaaaaggacaaaccagactgcagagtttatttagaaacattgtggaacattctgagctagaaacgcaacaaggagtatttcctttagggactgaaacagtattaacttatagcctgcaattagacccagtagctaagccataacctaattacttaaaagtaagtagcagtggttgccaaactggtagcgatcttctctgaggtagtttagggaaaaatttttcttgcatgttccacatgctatggaaagcctcttgaattccattctaactcactgtctttcagcaaacagactaacatcttatgaaattcttcttttgtcttctaagcatcatttaaaacactgaaatatacttaatcctcctgctctactacctctaaggacaacagtgaaaactgcccttgtgtgagtgtagcgtcacaagtaacaaccacttgtgttgatttataagattctccattagctaatcgggagttaatgctttgtgttaatgggtcttaagccaaacactagaagaagagaatagcaggcagtgtatgctgttacaatagaaacttttaagctccacatgttttataagactgttgacatttaactgcttctacctcccgacatgccactttcctcaactttagcttttcaaactgacttctgatcacactgcttcatcaaaacgcctgctgggaaagtcaccagtgaccttctgatcactagctgggttgattctttctccatccctgtccaccatataatttgtccttgccgccaggcttgtcacttattctccctcatgcaatccatgtaccagtcaaaactaatacatgctatttcccctggcctgtgcccatgctgtttctctgtgcaggccaccctttactctggtggttcaaattctaccaataccttggctcagctcagtggtaaactaggactcttaacactcagccttttattatcattattcggataaacatcttaattctgttataaaattaactccttgaaagattatagcttattaatctctacatctttcatggtttgtatttaatacactgctgtgcacataattactgtttaatacatatttgagacattgacttcaatttaattgaatttctagacggagcaaattatacccccaaagaacttgagtggatgcttcaaggtcacctgccagggagactttctaaaacgagctgttgtatctgaaaagtgcctctgagcagtgcccctgtagaagaacaaaagcatgtgaggctagacgcacacattttatcatcctcagtccgttctcatggggagcccaggacctctcttcaggggcgagtcttccatggtgttttattgtcaggcagagaacagtgctactgctgctgtagatttctctgactgggctctcctggctgtgacctgttagagcacacgtgcacacagagatgcacacacacacacacacacacacacacacacaatgatcatgtgcacagcacaggatatgagcagaaatacatcacatttctttgatccttattgcagtcaaggcacatgggtgcagctgcaacttgaactttagaatcagggtgtctcgttcctcgaatgagttcatactatctagcattttcattcttgccatctgtcttctacaataggtccctcttgttttccacctcatggaatgaatgttcttttatcatcctgtttattaaaaaacctccaacatatcactacacagaggaaaagcaaggctgttgtggatactcatgtgcttatgctgtgcacctacattcagccccagagccacataaagggctttctaataactgggatggcaattgcagatggccaacattataacactgaggcacagaaaatagtctcacctcttcccagtacttaggagcccagcgtggatagtggagagtgcacattccacatcttggttctgacactttcttgttgtatagtcttgtttcttcaccaatagaatgggtataagattatgtacctcatagatttgttgtgattatttaaacatatagcttcctaatccaatgcctggtccctaatgggtggttccttttaacaagcaaatattctcgactaccccataacatcagagaatagccttgaaacaatgttattgacattttaaaaatcaaacaatatgcaccccatattatagttatagtttcattgcaattacttaaaggagtgaatagacagactcaccttcatatccacttttaatctaactgagaatatctcaagacagtctattgagatggataaagtaagaaacagagacagagcttgttgatgtgtgtgtgagtcatcctccttgtgaggttctgtgtgtgatgaatggctcactggcgccctagggtcactaagaagagagaaaaagatgattagaagaaacggaacattttgcaataaaataaattgctatcaatatctgagcaagtgtatgactagattagccacatgaatgtctgtttcccagggtgagggaaaagctgtgaggcaaggctgttcagtgactggacttatatccaccatcactgattacaacattctcagcaagccgtatttcatctggacacattcagtccctgcccttgctaatgaagattaaacacatcattattttagctttccactcattcactgatgtcccttccagaagtcacctcaccccttaatttcctcctctgtaaagtaaagttcctactgttttctagctaccttcataaagatattcaaggatggctggaaaattcttaagttgtcagaggaaggcaccacaggtcaaatcccattaaaaacacatacagaaaagtattacattttctccatcataatggaccttcaacttaacaaataattcaaaatccggaggagtcctcacgccctggagaacccagctttagagggcggttattgtgatttttccctgtaataataatatttatttatttgtgtagcagtggtagcaagcataagaatagcaagcatcacgtaaggagtcgggaaacccagggttttttctagctctataactctgggcaaacctcagcacacaagcctaagccccatcttttacagaaaaggattggctctataacccttttacctcccaaatgcgaactctcatgcttatatagcactaagaagagtgagagaaaacatacacagtcctcaaagggtttacggtctccccacacctctgggcaacacaatctcagaacaagtatgtacaacgctgtgttgatcttcttatattcctgctgcctggttttattaagttcaatatttctgtatcatattcatgattccttaatttttttgtagagagttttagttttctaaaatatttatttataattgacaaataatagtccacatttatggggtacagtgtgatgttttgatctatgtatacattgtagaaagagtcaatcaaggtaattaacatatctatcaccttattgctttttttttggtgtgatgagaatgttaaaaatctattctttttagcaattatgaaatatacattattattaattatggtcaaaatgcagtgcaaccaatcactaaatctgattcctccagtctaacagagacttcgtaccctttgatcaacatctttccattccccatccctcctcctctcccctagctactggtaatccctctatactttttgtttctatgagatcacattttttctgagtccacaaacaagtaagattatacagtatttgtttccatgactggcttatttcacttagcacagtgttctccagctccatctatgttgtcacaaatgacaaaagttccttctttttcaaggctatatagtattccattgtgtaatatagtatgttttctttatccatactatcattgatgaccacttatgttgcttccatatcttggctattgtgaataatgctgaaatgaacatgggagtacagacatctcttcaacataccaacttcaattcctttaaatatatatccagagtgcaattcctgggtcatatggtaattatatttttagtttttttgaggaaacttcatactttttcccaaaatgactgtactaatttatgttcccaacagcatacaagggtttcctattctccagatccttgctaacacttatcattcctcttttggataatagctattttaacagatgtaaggcaatatctcattgtgttttaaatttacatttccctgatgattaaagattctgagcatttttcatgtatctgttagccattcctttctgttattttgagaaatgcctgttcagatcctttgcccatttttaatcatgttgtttgttttcttgctcttgagttgtttgagttccttatatattttgaatattagttgcttatcagatgtatggcttgtgaatattttctccccatccgtgggtggtctgttacttctgttaattgtttcttttgccgtgcagaagtttctgagttgaatgtgatcccaatttgtccacttttgctcttgtggcctgtgcttttggagtcctgtccaagaaatcttgcccacaccaatgtcatggagagtatcctcaatttgattttcacagtattgaacattaactgtgtagtgtcacagtttcaggtcttacgtttaagtattttattcattttgagttgacttctgcatatgagtgtgagataagtatatccacatgtagaagaatgccatttattaaaatgactgttttttcccaatttgtgttcctggcacatttgtcaaatatcaattggccataaacacttcgggttatttctgggcattctattgtgtttcattggttgaggcgtctgtttttatgccagtgccatgctgtttttttgttttgttttgtttttacaatacattcataatatttttgaaatcaggaaatgtgatgccttctactttgttctttttgctcaagattgttttggctattcagggtctttgtggttccatatgcatgttaggattttttttctatttttataaaaaaataacattgaaattttaaaaggagttgtattgagtctgtaaatcattgctttgggtattatggatagtttaacaattctaattttttcaatccataaacacagaatatctttccatttattgtgtcatcttcaatttctttaatcaatgttttatagcttttagtgtagagatctttcacctccttggttaaatttactcttaagtattttttctgatgctattgtgaatgagattatttttaaaatttcttttccagatagtttgttattagtgtacagaaacactactgatttttgcatgttgattttataacttgcatcttattgaattgatcacttttaacagtttttttggtgaaatctttagggttttgtatatgtaagattatatcaacagacagtctcatttattccttcctcatctgtctcttcccaatgaaaaagaattaacgctcagaattacagtatcttttcttgttccctcttttacctatcccactatattccaagaatagtaaatattaaaagacattgaataggttttggaatatacaatgaattaacttagatttgatctttgatattaacccacaagttttatttatatagttatatgagcattagtcagacttatcctctaagtcctaaaattttgtgtttaaaaattgtaaaatttacaaacaattgcttctgacgtaagaatgggaaaattgctttatttttataagtcctgaattcccagcttatattcatttggtgtcactgtcattacccataaatactactaggtattacatgaaattccattgtatacaataatgggttagtgtttttacctcattttagaaatgaggatatatgtgttaatgataaatgcagtgggaggaaagacattcgtatcccactgtcctaaagccaaacaataatgtttatgttgacctttcagatttgctcatcattttccttagctggaatcagaagaatagaagtcttagttttcagttttagattacgcaggttgcaactttattaacatgtgtatcgttgtccaggagaatccaaaaggcagcttagaagacggatgtttctaattatctgagtgactttgggcaccttttatttaatgtagccttaaggacccttccagttttgaggttatcttagcttttgattttcacagtattgaacacatgggattaagattcagtgagaaacagctgagtcagctattaactttctctcttcttacatcctccctggattttctaacaaatggtgcaattaatctaacgtagctaaaaggcattattaggtcacatgattggagtcatgggacagagggagggagatgggaaatggcaagtgctagctgacactgcagggaagaaataacaccactagaggcaaacttaagagcaggagatgcaagaactcacactgtatgtttctaggaacctctgtttagcaactgttttgcatatttttctggatttgtagctacttgacagaaaataatcagtggtgacttcttagacagcattccttctggtcaagctggtcttcagaatattaagctactgaacataagtcaaaagagaataaaagtttagtgtggattttcttgtatattaaaatgtgtggctttgatatactattttatttctgggctgagttagaatcaacttgataacaaaacagacatctcttcactcacagaacctggattgaggttctatttttgggtcttcactggaagttttgctactttggccaggatgtgtagacagcagagaattacagtgctcagtgagatgtgagctatagctgaagagctcatgaatcaagttttcctagtgaaaattatcactgttctttccatttaagtcacagatgaatagaattgcaaggctttcagcaaatccataatgtggacaattgagtcatattcctttgagagaggaaggagtagataaaatatcaggactgtaaccagtttccctaacagatgagtgagtgttaggagaaggaatgccgggttttgaacagagacttctatgggctccattcagtttcctctctgttcaaattctagagtttagctgacaagcttttcaagtctaataccacttactcctctagatttgtcttttcaccttacgcttcaacctcactaaacaacaagtgttctcctccaaacactacaaatccttctctatagaatacctttcctcaacagtttcaacttgtccttcttgttcctgcgtgcctttaattagtcaacatttatccctctatattccactgtatgcccggccttctctcttgtcctcttcctcactctgtcctggccaatttgttcttacatctctccatctactgcacagtatttgcctgatatttggtgtctgttccttgcctaaaacattgggaaaatctccatggtggggattgtgtcttagtcgtttggcacatccagttccaggacactcttcatatcctcaatgtggtaatactacataatcattcacttgataatagcagcagataaggtgaaaaggtagatagggaagagagagaatgaaataactgattttagggaattggtctaaggtagaattgaaattttggagcattttctatggccactcaaattagtagcatcctcttgagaaccttggttttgaagcaccagcctggaagtggcatgcatcaccttcacttttttccacttgtctcagtgtcagctggaagctttttgatgtgctacagcaaaaggctaagaaatggcgtattgaaatgagcacagaaagaagggcagaactgattttggtgcatgattagcagtccctgctggagtctgcagaccccaggaaaatcgtacatgtgttctcaaatgtctataagggatcaagtttcagaggcgtgggagacagaatcagagcataaagcatacttctttagtcaatcatagtactagggccctagggatagatctacacatgtgctatcacaaaccaaatcaaagcaaatatttattttgcactcatatgcatggcattgtgtttagcctcatgaaagacacacagaaacacaaggaaggcactgtttctgcctgcctctaatgatttgcagtgtagaaagattaaatcttaagcaactttacaagatatacaaagaataatagaggagatgtcataaggcaacaataactaatggcccaaattacagactaggcagagccggggcatagtaagaagtcagaggagggagtatgctatgcagtaggggtcaggtaagatttaaagaaaagtactgaggcatgaaagacaaggtgtgtagataagcaaggaaggagaattgggggagctagagggaactcattgaaaccccaaaaatcattgaggaccaccagttgcaaggttctggaccaagcctgggtgggcttgatgagtggacttgattctgacatcagggtggtgttgagttaggaaaattagtgctagagttggatttcacacttagatgaagggaaaatgaattttgtcaagggggatgctatttgactagggtctgaggggttgagaaatggtttttgcagtccaaaagtacagatggagcaaatgcaagcaggtatgaagcctatagtggatttgggaaggagaaacaaagaaacaaagatctattgagcacctgctctgctccagtattttgttgaggatttttgaatctatgttcattaggaatgtttgcctgtaattttcttttcttgtagtgtccttatttggctttgatactagaataatgctggcctcataaaatgagtttgagttctattgcacaatatggtgacaatttatattaagatatgatatagtacaaaatatctaaaacagaggcttttgaatgttctcaccataaagaaataataagtgcatgaggtaatggtaacactaaatacccttatttggtcattatacaacatatatatattaaaacatcaagttatacctcataaatatatgtaattataatgtatcagtttttaaaaatgaggtggctgggaatagtggatttatttctggattctttgttctgctccattagtctgtgtgtctgttcttatgccaataccatgctgctttggttgctatagctttatagtataatttgagacagctaatgtgatgcttctagttatattctttttggtctggattgctttagctattcagggtcttttgtagttctatacacattttagaattttttttctatttctgtgaagtatgtcattggtattttgataggaatgcattgaatctgtacttactttgagtagtatggccattttaagaatattaatttttccaatccattagcatgggatatctttccattttttgggtcctcttcagtttccttcatcaatgttttatattttccttgtggagatttttcatttctttgattaaacttatgcctaaaaatttaaaaagtagctattcagtaggattcaatgggattgctttctcaatttctaagatttttttgcaattggctattggctgagtacagattcaacgcaatccctatcaaaataaccatgacattcttcacagaaatagaaaaaaaatagagatgctatggatttttaaatgttgattttgcatcttgcaacttgagtgaatttatcaatttgaacagttttttgtggagtccttacgtttttctaaatataacaccatgtcatctgtaaacagggataatctgacttctttctttccagttgagatgccctttatttctttctcttgtctgattactctggctacaacttctagtactattaatatgtataaaagtggtaaaagtggtgaaagtgggcatacttgtcttgttccagatcttagggcataggctttaatttttctccatttggtatgatgttagctgcgggttgtcatatatagcctttattgttgtgagatattttccttccatatccagtttgttgagacatttcaccatgaagggacgttgtattttatgaaatgtttccgcttcagtcaggtagtggtgaagcaggccaggacttgttttcctccagttggggcagtggattctcctctgtcccagggaaggtctaaattctccctctctaggtttggaatcaggcactgtgggggctctgcctgtgctgtgttgcaccgtggcaggcctgactctaaattccaatacaaattcccatacccacttcccattcccttccccaagcaggaattgtctctctcctctctatggtgcctggcattgaggagaggtggttttggcaatgagtgattatccttcttaccttcttcagtgtgtatctcttcttgttattatgctaaaaccaggtactgtgatagctcacctgatttctttagctcttttgaaggtgtcttcttgcaaggatagttgttccatttgatgttcctgtggggggtgattgacagaaggcctgttcagctattttgctccccatatttgaaactcagcatttctttaatattccaatgtatcagtctttttttataattaatgccttttatgttttatacatactattagtgcattttgtgtacaaattttcttatagcccaaggtcatgaagattttctgcactgatgtttattggaagctttattgttttaccttttacttttaggtctacaatccacctaggattgatttttgcttatggtgtgagctatagattgcttcgtttttaaaaagaaactcttttcactgctttgcagtgtcatatttgtcatgaatttggtgtccacatgagtgggtcatttctgagctctctattatttccttagcctatttttcaatcttgatttctagaactaactaagtcatgttttctagcagagtaattctccccacattgttcttctctaagactgtctcactatttttgactatttgcattttaatattcatgttaaaattaactcatcaattttcactcaaaaagtgttgggatttagatggggatttcattgaacatactgataaacttaggaataaattacatgttttcattaatttctatctaatcttcatttatttaggactttaaaaatgtctctaaataatgtctaatcattttctgcataaagatcttatgcacctattattagatttattactatttatttgaagttgtttatgctattataaagtctgttttaaattaatttttgtcttagtctattttgtgctgctataacagaataacacagatggagtaatttataaacagaaatgtattggctcatagttctgaggactgggaagactaaggtcaatgcaccaaccagaggggagaagaacgctgactcctcatgtggtggaaggtgaaaaggaccaagagagagcccactcttgaaagccctttttacgattgcattaatccattcataagtgctctgccatcatgatgtaaacacctcccatcaagccccacctctcaatactgtttgcattgcaaatttcaacatcagttggggaaggggacaaacattcaaaccattttaaaccacagcattctggctgtggtcccccaaaactcacgtcctcgcatataaaatacattaattctttctcaatagtcccggtaagtccaaagtccagagtcccatctaaatggaagaaaatttgcagaattaggagtttgtaggcagatattcagaagaagccggcagaagaagttccttacccatgtagtgtcttaaaggccattagagataaatagccctgaggagtcagaagaatcttcctagattaatggttcatcattttctgtgttcccttacagaacggaagatatgggtgagactgaagcatggttcatcctgagacgaatcccctcccacaataaacctatgaaatcaaactatttatttatatgtttccagaatacagtggtgggacaggcacaggatagacattcctattctaaaagggaggaataggcaagaagaaaggggtagcaggtttcaagtcccaaagccaatagggccttacatcttaaggcttggaaaaaaatcttgactctatggcctgcctttcagacacacttgggttgacctcccaaggcctcagacaaccctgcccctatgactttgctgggttcagcccacacagcatctctcatgagttggagtctcatgcctgtgctctcccaggctggcagtgtatactagtggctctatgctttcagggtcccggggcggggtggtgggggggtccctgttcccattgcttcactaggcattaccttgatgaagactctctgtggtggccccacccctgtgacaagtctctgcctgggccccatgacttgccataacatcctttgaagtcttgttgaagaaattcatgcctcctcagctctggcactatgtgagcctgcagaattagaaccacatagatgcctcgaaggtttacaatctgccttctggaagactaggtgtggccaaggagagttgcattagaatgcatggatcagagtcctgagacagccctgatagagagcagcccacggagggcgccctgggcccatcatccaaaacccttctgcccacaaagccctaaagctctgggcctgtgattagaggggcagccttgaagacctccaaaatgcctttgggatcattctcccactttcttgatgagtaacacttggctttcttttatccatttaatctacaaattactggaattaatcagtgtaattagcaaggttgttgaatatgaggtcaatacataataatcaagaataacaataattaacagcattttaagtaatgctattatttgaatgtttgtcccttcccaaattcatgttgaaacaatctcccatccaacagtagtgggaggcagggcctaacaagaggtgtttaggtcatgaggcctctccagtctatgaatggattaatgctgttgcaaacagagctttcaagagtgggctttctctcttggcccttccactttctgccatatgtggatcctgcattctacttccctctagaacatttcaccagtttttgcgtgcactcatttttctaatgcatgcttgtgcaaaattctatgacattttatcaaatgtacagtgatatttgactagtaagcttatctcaaattcctggaataaattcaacttggttgtgggctgctatcttttttagttgttgctggcaaatctaaacattggttaaacaaatgtttaaatgttatttttttcaggtttcaggagtgcttgtttcggtttcaggagtgcttgtttcagtttcaggagtgattgttctgtaatttttccttcgggaatgtccgtatcaagtttgtgtaccgacattagattaacttcataaaagaagttaggggaagagttcttattttttctattctcttgaaaagtttataaaagttttgtaaatatttagtacaattcgccagcaaagccatctaggccggatgttctgtttgtgtgaattttttaaatttatagattccattcctttaatagtttcaggattatttagaatttctatttttcttgtgacagttttatgcattatattttttcagaaatgtgttaagtttaccaaaattttcaaacttattgccataatactggtcataatgtggtgtaattttgttttttactgcttctgagtctgtgacaatattccccttttcaatcctatattgttggtctttgtgcgttccctctctgtatctgtcttttggtcagtctcatcagggtttatccatattactagtctttaaaaacaaaacaaatcttaatgttgttgttttctttttcataatttccactatctttattcttttcattcattcttcttttaaaattccttgggtttaattcacaactttcttattcatttcttgagctagatattttagatctttatttttcaccctttctacttttcttacgtatgcttaaaattcatataaatgcatataaattattcctttaagtattgcttcggctatgtccccaaaatttgatatgttacattttgttatactttcaaaatattttctatttttatcatggtttcttctttgatccttggcttagttataagtgtcctcctaaatttacaaatatttagaaagtttaagtcctctttttgttattggtttctagtttaattgcgttgtagtcaaagcacacagtacgtatgatttcaaccctttggaactggttaacacttgcgttacacgtttgggaacatttgtattttaatgtttttgggtgaagttttctacatatgttcatgagagtcaagtttgttagccatgttttaaaaaaaatctattcatactgattttttgtgctttgattttattagctagtagaagataggcattgaaatttcccattatgattataggtttgtctacttcttcccgtagttctttttcatttatcttgatgttttactgtatgattgtacatctagaattttataattccaaatgaattaatgtcattatgaagtgctcctcttaattctcataatgcttttatctcagtgactagcttgcatgatactggtgtaggtacaccatctttctttttttcttgttgttgttaatgttttcactcttttcctttcaagcctcctgttttcttgtgtttaatatcgctacacatatgtaagtagcatatagttgtttttgaaaaatctaatttggcaatatttattttgtaaatgctttaacacaattgctgatattttaggtttatacctatcgtcttattgtatttttattttcccatatgtacttgattcatttttgcttttagaacagttgaatatcttttattattccttttcttttctccattgtttggaagtttttcctgtcttatcatccttccagtgattgctttacagatcgcaacatgccccttcccttaacaaagctgaaaattaattgctaaaaattgacaaatgggaactaattaatctaaagagctttcgcacagcaaaagaaactatcaatagtgtaaacagacaacctacagaatgagagaaaatatttgcaaggagagcagaagaaactcgaggagctaaaagtgaaagctgcagggaaggggcccctggctagaggtcaaattaagaaatctggcaaaaagtaagctgttccttgtgcctgaggagttggtgactcttgatttcatttgtacttaaacacctgtattccccgccataacatcttttgccacctatagctggaatgaagtgttgtctcggaactggtgtaaatataagaataaacttttgtactaaaaaaaccacaatgatataccatctgacaccggtcactgtggttattattaaaacattaaaaaataacacatgctggcgaggctgtggagaaaaggaaacacttatacactgctggtaggagtgtaaatcagttcagccactgtggaaaacagtgtggtgcttccttaaagacctaaaacagcatttccattgacccagcaatcccattactgggtatatacccaaaggaatataaattgctctaccataaagacacatgcatatgtatgttcattgcagcactattcacaatagcaaagacatggaattaacctaaatgcccatcaatggcggactggcttttaaaaatgtgtatgtggtacatatacaccctggaatactacgcagccataaaaaagaataagatcatgtcctctgcagcaacgtggatgcaactggagaccattatccttagcaaactaatgcaggaacagaaaaccaaatacagctgttcccacttataagtgggaattaaatgatgagaacacatggacacgaagaagggaataacacacactggggcctacttgagggtggagggtgggagaaaaaaacgggataaggaaaaatacctgtagggtactatgcatattacccgggtgatgaaataatctgtacaccaaacccgtgtgacatgagtttacctatataacaaacctgcgcatatgccccggaacctaaaagtttaacagatcctgaaagaaactgctacttttaatccatttattccctctcaatttgtatgctattatcttgtatcttaaacacacacacacacacacacacacacacacacacacacacacacttttatgccacatgagacagcactattgttttgtggctccatttttataaagctatgttgtcttcttcaaaaaagttaaaattcatctttacataatacagactagatctagaaattaatatacttttactctttgtacctgagcaaaacagaacactagaaataaaggacgctaaatagcataatagaaagtctgtatgtatgtgatttcacaagtaaacaattagacacatccctgaaaacactgtaactgtaagaaagcaacattttttcttctgatgtctgcccaagcccaccttccggaatccattcattaaacagctttatgtcaactttgacttcctccagttatctctgacactaatgacgaaatttttctttgacttttatcaaggtaaaattcattttaagaaatgaccactgatttgtttaagatattccagcatgggggaggagggcaaaatatacatttataaatgaataagtcttagttataactttattagcttttgactcaagtttaagtcaaaaaaagttgattttatcaacttttattaaaattgggaaataggcatgtggcatttgattatacatatctttatttttgtgtatgtttgaatttttctttaatataaagtaaaaaatagtggcttttttagttttttagcttttttaaatgaaatttaattttttaattgatatgtaatagatatacctacttttagaaaaacatcaggccgggcgtggtggctcatacctgtaatctcagcacctgggaggctgaggcgggtggatcatgaggttaggagttcaagaccagcctggccaacatgatgaaaccccgtctctactaaaactacaaaaattagccaggtgtggtggtgaacacctataaccccagctactcaggaggctgaggcaggagaatcacttgaacccgagaggtggagactgcagtgagcccagattgtcccactgcactccagcctgggtgacagagagagactccgactcaaaaaaaaaaaaaaaaaagaaagaaagaaagaaagaaaatcagtgtattttttgcctatcacatctgcagagtatttgtcccttacttagagatctcagtaagaaatatttattacaacacataaaatgcattattcactcatcaaagttgtcagataatttgctacagtttttttccttgggtagcattaggggttccttgaggatttcaaacttgaaaaacacatgttttatggcagcaattttattcactttattattttttccaacttttccctcccttcctctcataataacgtttattgatcaggcactgtgctagctactttatgtttgtaatctgctttaatcattcctgcaaggtagcaggtatcagcacctctcatttggagagtagtacgagatgggaaaagagagcaatactctgggggaggcatatcagataacagtgtagtttgaaaaagcacgtgtaataatataataaaaacggtcacacaacatagagttgatcaaatattcactactagtaggaatatactaaagacatatttttctaccccagacattagaatctcaaggggagtgggaagtgattatttgaaaagttgatcagtttttataggtagaaggcttttgtttatttactttgcgatgtggttgtttcttgccttttctctccgaattcccttgcagtatgggctggttacactgtgttccacctgcatgatgactgtgaagcttagaagtcacagagttctgtggttgttgtttaggatcactgttatgtagtattgacatttgattattattttgtgacaagagtctcactctgttacccaggctggagtgcaatggcatgatcttggatcactacagcctccacctcctgggttcaagcgattctcctgcctcagcctcctgagtagctgggactacatgcacgtgccaccacacctggctaatttttgtatttatagtagagatcggttttcaccatgttcgccaggctggtctcgaactcctgaccacaagggatctgtccaccttggcctcccaaagtgctgggattacaggtgtgagccaccacacccagcctgctattgacattttatattctaatatatgtgttttaatttaattcagctcttataagaacctgatgagtgagatgatcttaatcccattatacatagaacaaaatggagatgctagaggtaacttgcccacatttactatccaggctactgttgtaagtttaattaagtgcttcagaactttttctgttcactcctgtgtgaaagtgtgtgtccttgggctgtatgtctcatgcagagcataatttcagaggaggcggtattcactgatgaagtcctgggcagctttgaacacagcctagagtatttaaattgtggccacacacagtgtgacatcactctagtgatcatctttgaactgaatgagaagagtgtttcctctttaccctacatgcattcattttcatgtttattagcccaggcgaaaaactttcctgaggactgactctgaaaaccgatttaatacttctttcagctgctttcctctttcagctgtggacctagaagccatgagcagctgctctccaggacgtggtggtgatacccactgctgaaatagcatgtggagcactgatgcaggaggccagttttatgccttctgtcttggacaaagaaagcaagctggccctgacatccagttgtcatactttaagaataaaaaataaataagtaaatatatagataggtaataaacagggccaggcatggtgactcatgcctgtaatcccagcgctttgggaggccgaggtgggtggataacctgagatcaggagttccagaccagcctggccaacacagtgaaaccccatctctactaaaaatacaaaaattagctgggtgtggtggcacatgcctgtaatcccagctacacgggaggctgaggcaggagaatctcttgaaccaggaggcagagtctgcagtgagctgagatcacaccactgtgcttctgctgagtgacagagcaagactgtccaaaaaaaaaagaaaaaaaagaaaaaaaagataagcaataaatatactgataccctgtataataatacatattttagaactatggatcaaatattaaagtcttccacattcatacaatatccttaattaagatcaggctcaagtgagcatttctgacctgtatgtaattaaatgctgactgaattgaatatgtctacagtatgagaagaacacaacaaaataataggttttatagactgcctttgattttcacttagtggtgtttttagtttaataaaacctctgaagttttttataaaaacttttatgtatacaagcctgtttctttttctaagatttttgcatttcacaagagaaaattccattcttaacattaatgccatccccatcaagctaccaatgactttcttcacagaattggaaaaaactactttaaagttcatatggaaccaaaaaagagcccgcatcgccaagtcaatcctaagccaaaagaacaaagctggaggcatcacgctacctgacttcaaactatactacaaggctacagtaaccaaaacagcatggtactggtaccaaaacagagatatagatcgatggaacagaacagagccctcagaaataacgccgcatatctacaactatctgatctttgacaaacctgagaaaaagcaatggggaaaggattccctatttaataaatggtgctgggaaaactggctagccatatgtagaaagctgaaactggatcccttccttacaccttatacaaaaattaattcaagatggattaaagacttaaacattagacctaaaaccataaaaaccctagaagaagacctaggcattaccatttaggacataggcatgggcaaggacttcatgtctaaaacacaaaaagcaatggcaacaaaagccaaaattgacaaatgggatctaattaaactaaagagcttctgcacagcaaaagaaactaccatcagagtgaacaggcaacctacaaaatgggagaaaattttcgcaacctactcatctgacaaagggctaatatccagaatctacaatgaactcaaacaaatttacaagaaaaaaacaaacaaccccatcaaaaagtgggcaaaggatatgaacagacacttctcaaaagaagacatttatgcagccaacagacacatgaaaaaatgctcatcatcactggccatcacagaaatgcaaatcaaaaccacaatgagataccatctcacaccagttagaatggcgatcattaaaaagtcaggaaactacaggtgctggagcggatggggagaaataggaacacttttccactgttggtgggactgtcaactagttcaaccattgtggaagtcagtgtggcgattcctcagggatctagaactacaaataccatgtgacccagccatcccattactgggtatatacccaatggactataaatcatgctgctataaagacacatgcacacctatgtttattgcggcactatgcacaatagcaaagacttggaaccaacccaaatgtccaacaatgatagactggattaagaaaatgtggcacatatacaccatggaatactatgcagccataaaaaaggatgagttcatgtcctttgtagggacatggatgaaattggaaatcatcattctcagtaaactatcgcaaggacaaaaaaccaaacactgcatgttctcacccatagatgggaattgaacaacgagaacacatggacacaggaaggggaacatcacactctggggactgttgtggggtgggggaaggggggagggatagcattaggagatatacctaatgctaaatgatgagttaatgggtgcagcacaccagcatggcacatgtatacatatgtaactaacctgcacattgtgcacatgtaccctaaaacttaaagtataataataataaaaaataaaataaaataaacaacaacaacaacaaaagattttccagatgttaagatctaatgaattagaatttttttttttttttttttttttttttgagacagggtctctcagtctgttgcccaggttggagtgcagtgatgcaatcacggctcactgtagccttgacctcctgggctcaagcaatcctccacctcagccactcaagtaggtagcaccacaggtgtgtgccaccacacctggctaatttttaaaaatttttttgtagagatggggtttccctgtgttggtcaagctggtctccaactcctgggctcaagtgatgctcacacctcgacctcctgtagctacttgggaggcaaggcaggaagactgcttgagcctgggaggcaggggttgcagtgagctgagatcgtaccactgcactccaacctgggtgagagagtgagactctgtctaaaaaaaaaaatttatatatatatgtatataatctgatatatatatatataatatatatatatatatcacatacttttcaaaaacatacagaaccaggtccttaaagagacagtccttctatcatgtaattcctgtgaaaaacgggatattgtaataatgctacctgtaaacctgctttttttttttttttttttttttcgagatggactttcactcttggggtcacccaggctggagtgcaatggtacgatctcagctcactacaacctccgcctcctgggttcaagcgattctcctgccttagtctcctgagtagctgggatacaggtgcctgccaccacacccagctaatttttgtatttttagtagagacagggtttcatcatgttggccgagctggtcttgaactcctgacctcaggtgatccatctgcctcggcctcccaaagtgctgggattacaggcatgagccaccacacccggcctaaacctgctatttttaaaaacaaaaatatacacggttgcatgcatctccatcacgtcctctttcaaacctgtggatcctgtggcttaagtagacatcctaactgttactggcttgatgtgtagccccctggagccagatccttactggggtatgattagggctgaatggaattgggacaaccggatggccagcctgctttgtgttcactggaggtgggggagtgccgacccactggtgtggcacagcagagcaaggctgaggcttatcacaaaacgtgattattaaccagtagtgcacggagctgcactgggcattttctttgaagagtgactactttagtgatgtgtctgtaggggagagggtgaggtggcatagcctcagtgatttaaatctttttagtcacgtatatgatctctgcctatgatgacaattaggatttctcagattttcttcttactctgatgtttagcaccaggaccaagtcgtatctgttgagtccacttgtgatggtggaggtctgttatctccatatagagagtttaatggccctgtagacacaatataaagcatggcccttgagcaggagacttaaggttggctgggcacggtggctcacacctgtaatcccagtactttgggaggctgaggcaggtgatcacttgaggtcaggggtttgagaccagcctggccaacatggtaaaactctgtctctactaaaaatacaaaaattagccgggcatggtggcaggtacctgcaatcccagctacttgggaggctgaggcaggagaatcgcttgaaccctgggggtggaggttgaagtaagttgagagacgccactgcactccagcctgggcaacagagtgagactctgtcttaaaaaaaaaaaaaaaagaatattcaggcagaggcagcaggaatgtgtatgtttctcttgttggattcatcgtcttctctcccagctaaggagctgcatgggagtaattgtgctggtttctgttagatggatacctgcatgttctcagatggagcagagatcagaccctcttctcactaatacgtcatccaaattgctagcagtttcagcagtggtccagaaaatggtcaaatctctgtttgatgagtaaggtcaaggagtttccccttggagttacaggggatcatctcaagaccaggagcctctgcacaggagacacaagcatcccgtgaacatggaggacaacacatggcttcaaatcatgcttcgccatgtatgcagaatctctctaagatttctgtttcaaattcgcagatcaccacgctagtccctaagggcatagctacttctggttagtgagagtgaaggaggtagaggtcaaaagcatagattgcttccagaactgcagtccctaaacagaatattcaaatagggctaaggagcctcattctaaagtcagaaagtgactgtaatttacctggtaattagatatgctcagaagtaacttctgacttttcccatcaatttctaggctcccttaacacctgtaatagctggacaaaggaagaaagtcgtgctgcccttggtggaagtttggacccatccccagagaactgtatacgcttcctgctttcaaataatatgtgtaatcctatggggtctgactggcagacttacttttttttctgattcaaaatgccattcctgtatattattaaaatttggaaagtacataaagatataaagaaattttaaagcaccacacgatcccactactaagagttagggtctaaaatagtgtggtctgtcctcctgagcttttttctaggtgtaaatgagctagcatcagctgcactcagagcccataaacccaggttcactttcaaagtcgtgttcaggaacttctccttgcattctacctgatggggatcagatcttttcgacctaccagttatacacacacacacataaatacacacactcagaagttcttgatgttagattaaaaaaaaaaagaccctgatggcttgaagaattgacataccacaaaaatgtacgatgcacttttatggggtacacagaggtgaagtttgtcttataaatagatggtggatccaaggattaatttacagaaaaaaagctttggaaacttttaataaatatacagcaatttcaaaacattacactttatacaacttttatttttttttttaatagagacaaggtctcactatgttgcccaggctggtctcaaactcctgatctcaagtgatcctcctgcctcggacctccaaagtgctaggattgcaggcgtgagccaccacacccagccaacttttacaacttttaaagagagaaattacgaaatgtaattaaagttctgaataaatgccccaagaataatgagatcctgaagtctctttcacctgagccttcaaaggcatgaagcacaatgacaaaagtagggatgaacatatgaggaaaaaagaaaaaaaaaataagttgtgcctctataaaagccacccaccaaacacaggacaaacatgaaagtagatgatgacagactaacacttcagtacaaaaagagatgctttataggaccttaaactatctccactcaatatttttcatgaggatgctgtacttattaccgatacatctgactttgttacttctttgcatttctgctgcatttcaatctgagaaagtcataaattcttgaagctcttagtattttttctctcccttctgggaaggttagaaagatgacaatgataaatgcataaataaccagcagggagggaaggtgcatcattacatttagaaacacctgactgtcctagctttttattattttaagaaagaggaaggttattaaaggatattttagaactacagaaaaatcaataataataaaaactagtatctgtatgtgatgttagagttcacaagcactatcatcaatttccatttaattcttgtattagtccgttctcacactgctataaagagtattacccaagagtgggaaattatgaaggaaagaggtttcgttgactcacagctctgcaggcgttaacgggaagcatggctaagaggtctcaggaaacttaaaaccacggcggaaggcaaaagggaagcaggcacctttcacccgatggttttaaagccatcagctctcatgagaactaactcactattatgagaacagcatggggaaaccacctccaagatccatgaaccacccccaggatccaatcacctcctacctggtccctccactgacatgtggagattacagtttgagatgagattgcgttggggactcggtcccaaaccatatcaattcttaagcaattttgtgacacagattttttttattatccccactttataatttactaaactcattgaagtacataaagacatcatacagccatcgggggataactcagtaggcttcttggtctaattctgtgatcctcaaccaggagtgatctctccacctctagcagacatcggcagtgtctggagacatttttggttgttaccactaggtagtgctattggcatctagtgggtgagaccagggatactgctaaacaatgcacacgacagcccgtcacaacaaaggctcatccagtcggagtgtcagtagtgttgagattcagaaacactggtatgttctacactttcattagggtcctgatgaaactcttaaaacttggtgtggcggtttgtctaaacagcatcctttctctcattgttcttgctgtcagaacctcattttattcagggaagggcaccctaatctcagtttaggagtaaatattggttagactagattaatcatggtaatcccatttcctgtcagcagttgattatcagggatgggcatgtgacctggttctgaccaataagacacgaagggggatctgctagagggatgggttctgggaagtatgtttatactttttttttttttttgagatgttgaaattatttttaggaaggctaagaactaaaatcatttatatatgtatgatgagacaacaagggatgccaaaacaatttagaaagaatatacttactaaaattgctagcaaaggcaaaaaataaattaaaaagtaaacccaaaacaaattttagagataccatgccttatagaacttctagaattgatacattttaaatttatggaccatttccttgaattgaaattaacagcagagactttccaatctaggcaaaaaaaaatctgcttttcttcctccagaatcagagaaatcaatgaagtgaaacatgaaagattcatgtgaggtgccctctactgaaagcataaattttgatgcaatcagagaaaaacattatgagagaggatgatcattaagttaatatcttccaattacctacacttgtccctcagggtaagtcactgagttatgaatggtgtttgttcaactacaatagtccttcctaaccacataagattcttaaatccccttctatcagagaataactcttgtagtaaattaggattcctaaagggagtatcaagagctctcagtagtgttgaggttaaatcactctttccagcaataaacactatttctgaaaagtaaaactgaaatcgaacttgtgtcagttaagtgtcattgcaaagttttaaactgtgctcagtgtataaaggttttatttttccccagtagtactgaagtataattgacaaacaaaaattgtatatatttaaggtgtaacatgtgatgttttgacacatatatgcattgtgaaatgattaccataataaagctaagtagcatatccatcacctcacatggtgaccatttccttttgtagtgagaacaccacacagtgaaatggtcacttctgtgggctgcctttttggtgatggaagctcagcttgcagcagatgtgaaagtaaaacaacttgagtaggacttgcaattagagaaaaaaacttttctgagctctatgttcagaagtcagcttaattaaaaagctgatattcaggatatagtgttttctcttttttttggaaaaaaaagggccttctgcttttagtcaactgaaatctcctttaagaccttttttttggcctggtgatgtggctcacgactgtaattccagcactttgggaggccaaggcaggtggattacttgaggtcaggagttcgaaaccagcctgaccaacatagtaaaaccctgtctctactaaaaatacaaacattagccaggtgtggtggcgcacatctatagtctcagctacttgggaggctgagacaggagaatcgtttgaacccaggaggtggagtttgcagtgagccgagactgcaacactgcactccagcctgggcgacaaaacaagaaagactctgtctcaaaaaaaaaaaaaaaaaaaaatttttttgtttggcgcctttcttgttggcgtgatttttgcctctgtaacttgttcttccatttccttccatgcctgttcttccttccttttgccatctttgatatcacacgaaaaaaatctaggggagacgtctagagaccctgagaccccttaaggaacagagaaaaatgtgccatccgtcccctttaaggagtcttctgccttccttgcggagttccaagaatcattggaaggtttgccttcagtctaaagttctgctctctcttgaattgagttccctgaactctttggcttttgggagtagtaccaggaattgctttggactcagagaacatgacctttgagtgtgtgatggctgataagtcactggtgacggctgcagttttggaagtagctcatagcatttacaatgagtggttattacagctgggggctactcgtttctttgtgcatttaggtaagaaaagcatgatctgcaagcaaaaaacaaacagccacattaaaagatgggaaaaggatatgaacagacacttttcaaaagaagacatacacatggccaacaagtatatgaaaaaatgctcaacatcactaatcagagaagtacaaattaaaaccacaatgagataccatcccccaccagtcagaatggctaatattaaaatgtcaaaaagtaacagatgctggtgaggttgtggagaaaaggtaacacttatcaggttgtggagaaaaggtagcactgattcactgctggtgggaatgtaagttagttcagtcactgtagaaaacagcctggtgattgctcaaacaatttaaaacaaaatgaccatttgacccagcaatcctattattgggtgtatacccaaaggaatataaattattctaccataaagacacatgcatgcacgtgttcattgcagcactattcgcaatagcaaagatatggaatcaacctaggtgcccatcaatgatagactggattaaaaaaaaatatacaaaatggaatactatgcagccataaaaaagaacaagatcatgtcctttgcagcaacatggctagagctggaggccattgtcctaagcaaactaacacaggaacagaaaacataataccacatgttctcacttataagttggcactaaacattgagtacacatggacacataaaagggaacaacagacaccgggatctacttaagggtaaagggtgggaggatggtaaggattgaaaaactacctctcaagtactatgcttattacctgggtgatgaactaacctgtacaccaaacccctgtgacgtgtagtttacctatctaacaaacctgaacatacacccaaaacataaaagttaaaaaataataaaaaaactaaaccactgtacgggattgattaattaagtaatatgtaggtatcaggcatacgtgatcaatcccttcatttgtttatattggaggaaggatgggatccagccccattcacctaggagaaccgcagaggtagcaacactcaggaccttgatattggatctcctggaagtccatttgtagtgagggtcttcccttcagggtaaatataatttttagctctgaagaaggtttaagttttatatatagtctaggccataggtgctggagaccataactagtaaggctaagcctatggtggctttgcaggctgcgaaggataatgggtaatatggatgctaaaatgaaatgtaaattcaaggttataaggatgctcatgatgaatactgacagcattatgccttctagacatagaaatgagacattagatgagatcggtaaattattattcctgctagagatgtaatgaaggccaaggtgacattaatatagatagaaggcatttagtaattatgagtaatcataatttaatgagtcaaaatcatttgttttggtttaaactcattaccaattcaactcattctagtccattttggattcattcatgggctaatcctagggctaagacagtaattaaaatgagtactataataagtactaattttaggctgttcattcggaagggaagagaagaccctcactgcaatcaggcatccaggacagtgatcatatggtcccacactacctcttcctcctccctgggtcctgcatttaacttcctaatctctgctggtagcaatattaactgagtattcaagactctcagggcccctctcaaaaaaaaaagaaaaaagaaaaggaagaaaagcatggtttggtcacctgcaggctatagaaatgcttgccaatgagggataagactcccagaggggatgggctgaccagcgtgggctgactggcattgggttggccagcagcctcagggggctattctgacagtggagtacactgtggaagcatcgcactggctagtcccatggtgcttccctctttttggggacctaggattcagtgtgaaaatgggattcttgatttcggggtatctaagtgctctaccttccagccgtggctgtttttcacacacatatgaagccctggaagctgcaaatgctttccttgcccttttcatcaaaggactccaccttgaagtcagtaatctcatgaataaacaagctaagtggaaaagaccacatatcaagctcaatcagtttccaaaatacaactttctgacatttagttggccattttgaaactctttgtaaataaaatttatgtctataaaagaaatccccatttgtaagcgcatctctctctctgctcctaaaccattagaaattgtaggatgaagacattgacttaatatttacataacaaaccttatctttgtgtaagatatttttcctggcaagcttgtcttgactgggcctttacctgtgtccttctttgcctcagcaaataatggttttaaacctaagttctgtgcctttgagatacaaactttaatctgcgagtcatgtctatggaagtacaaatttagggttacctagctaacaattattttggggaactgaacgggcaatcaagagattgatcgtctaaagcgcgaagggaaactatttgaaaactgtcaaatgaagacccttataaagctattgtgtccggaatttattccttctggtaggttcttggtctcactgacttcaagaatgaagctgcggacctttgcggtgagtgttacagctattaaagatggtgtgtctggagtttgttcctccagatgttcagatgtggcctctggagtttcttccttccagtgggttcatggtctcgctgacttcaggagtgaagctgtagaccttcgcagtgagcgttacagctattaaaggtggtgcgtccggagttgtttgtccctcctggtgggttcgtggtctcgctgacttcaggaatgaagcggcagaccctggcggtgagtgttacagcttacaaaggtagtgaggacccaaagagtgaggagcagcaagatttattgtgaagagtgaaagaacaaagcttccacagcgtggaaggggaccccagcaggttgccactgctggcttgggtgaccggctgttattcccttatttggtcccacacacgtcctgctgattggtccattttagaggcgctgattggtccattttatagagtactgattggtcgattttacagagtactgattggtgcgtttacaatcctttagctagacacagagcgagattggtgtgcttttacagagtgctgattggtgcatttacaatcctttagctagacacaaaagttctccaagtcctcactccacccaggatgtccagctggctccagctctcactataagatctgcttctgtcatatgtctgtatgtttatacgcttgtatgtatgtacatttcactacccaaatatatgaaagagctctaattaattggcttaaagaaaaagtaaatgctgaaataaaatatgtcaggaaaatagaaatgacctcagatgccttttatgtcatgtgtctttagtaattttgggcaaataaaactagtttttacgttgttggtaaaataaaatagaaatgtgttcagaatcatcagagttaaatataactgaggcattttcacctagatctactggtaagataagtttaggctatctctcctagatttttaaggtcacaaatgttgcttctgtgacatttttgatacttctttgacttttctgtgagcttatgttatgtcttggagccattagatttcaggctctaaacaaatggccacagtgaggcctggggacatttgtggagttctcactggcccagttgtgcctcctggctatgctgggaagggacagacattatcctcacagctctgtcctccattgtgagctctataattggtgtgtacatttaagacccaaatgggccctaccctttatagccgtccttgtgatataggagttaagaagaaattacttaggcagatagtaagggtatgggagtcctaggtaaggatttcctttttagtgaaaagcagccccaaatcgttttctaacaaagaacagcctgcaggctgggagcttgcacaggtgaatgctggcaggaaatatgggctagacacgttaaagatggtggctccatcttcccttctctgccagtcacctgtactgtaaaggagcagacaagatggtgccaatcaactggaaagtccacttgcataagaaaattagggtggggcaaccagccttccgcacgcactatgtagacgtcatacctgatctaaccaatttgtgagccctttgtaaatcagacaccactttctcctgcctgcctataaaattggctgcagtccgctgcctccttgactttttggatgtctttctctctctctctctctctctcgcaaagagctgctctcccatatcctttttctgtctattaaactttccactccttaactcacccacatgtatctgtgtcctgaattctttctccacacacaacgaacgccagggtatataccccagagagtatacagccttcacttgggtgtacatgggtacttgggacccaggatgagtagggaagtcagtaaggagtgtgtcatagtttcaaaattcttttcagtaacttaaaatcttaaaatcatgttatgttaaactaagtaatagataatcatgaaatatctgaaccatttaagtaactttaaaaactgaaacattacttattaaacataagtttaagtttatatactttggcattttatttttaatatgatacagaacaaaatatatttcaatctgttaatatacaaaaaattgaggaaacatctttctaaaaattttgatttttatctacgaatacagatatagacagttcaaaattacttcccatgtttttcactggaaattagtatttctaagagttaaaatggtagtcaatatacataattaaaactaatagccataagagaatcaattctacatacaaagtgtataaaaaaagtaagatgtaattttggtgaagaatgttataagacagatatgaggatgttgttttaactcttagaaatccttttatcctatttgatgaccatgaagttttgattgcggtgtaaagtggaatgaagtgactgacctcatttctagaagattctagtgggccaatgctcagctcccaacttctggactgtatgctctaactatgggggacttgccttgatccctgactttgtcctctggctccttgagtttaggtatccactgtgttgaggggggtcgaggtactcccggaccattggtcactacactccgatgggtggtgtcggccaaagcatttcatagtgcggttacagcaagatccattcttgctcacacgtgccagcagcagtggtagtggcagcatggtaggttgcacgcttgtcagctgaggcagagtgctagcaggtgccagagtgcctgcctcccttcatcataggggtggaggcaatgcagctgtgggggtgggagcttggtggagaagcctgattgcaattgtgtgcatggtcatactggtggtggtattggcttgggggtagggtgctggcagacaacacaggtctgtgtgccttctctgtgccctgtaacaggagtggttgttcggggcaggtgaggatccactgttctctgtgcctagtttcactccctcagcagtgttagcacaagagtggggcactggcgggggcagggctggctggctctgtgcctgccaagtctccatctgcagtgatggtttgcggagggaggagtggcagactgtactcccgccacagcagtggcagggcacggtgcacacatactcgcctgctggtggatcaaggaaagcaaaatctgcccattcagacacatgccagcaaagcaatgtgaggagttgcactgggccctagggaagctgcagtgtggagagggtgcatgcaggctggtgcgtaggcatgggggccgccatgctagagctcctcgcaggttaggtatagtgtgccagtgcagaagctatgatgtagctcccagggcgctgcaagcaggtgtggccaggctggggccctgggagaggccggcagactgaggggtgctcaggttggactggccctatttgatgggcaagaccaccctgcagagttcaggactgacagttctccaagggctaaaggctcctatgggagcaagtggagcctagggtgatggccatccctggccctgctctgctacagatgctccaggaccaaaccctctgggctccacatcggctggtttgctgcctcctatttcttctctaagcagctctccctgccaacttgtgtctatggtggctgaagggtctccttctgctggagttccagagactcgtggtgaaagtgagttgctccataccagttcaactcacctgttcccctggagctgctggggcacagggacaacaccaggtatgcagcagacccatgtagggttcccaggtttccccctctcagtccaccttctgtgtgttccctctgttcactttcagtgccttccctttgaagatcttctaggagtataccagtcatctcggtcccttggtggcagctgttttacgtggctgcatctagtcagccatcttgcccccgctcaaaaacttcttactgttaatgtgggaaaaactgaatgctattcctctaagatcttcacaaggcaaagatgcgcactcttgccatttctattgaatacaggactgtatgtatgagcaagagcaattagtcgagaaaaaaataaaaagtacacaagcccttttttcatgtgtgttggccgcataaatatcttcttttgagaagtgtctgttcatgtcctttgcccactttttaatggggttgcttgtttttttctggtaaacttgtttaagttccttatagacgctggatattagacctttgatggatagattgcaaaaattttctcccattctgtaggttatttgttcactctgatgacagtttcttttgctttaattagaaattatagaaattataaattactttgggcagtatggccattttcatgatattagatagctcttttgtttaattagaccccatttgtcagtttttgcttttgttgccattgcttttgatgttttcatcatgaaatctttgcccatgtctatttcctgaatagtgttgcctagattttcttctagggtttttatagttttgggttttatatttaagtctttaatccatcttgacttaatttttgtataaggcttaaggaaggggtctagtttcatttttctgtgtatggctagccagttctcccagcaccatttattaaatagggaattatttcaccattgcttgtttttgtcaggtttgttgaagattagatgattgtagatgtgtggtcttatttttgagtttctctattctgttacattggtctatgtgtccgtttttgtatcagtaccacgctgttttggttattgtaaccttgtagtatgatttgaaggtgggtagtgggatgcctccagctttgttctttttgcttagcattgtcttagctatccaggctcttgttttggttccatatgaattttaaaatagtttttttttctaattctttgaagaatgtcagtatgtcagtggtagcttgatgagaatagcatagaaattataaattactttgggcagtatggccattttcacgatattgattcttcctatccatgagctcaccatcactgatcattagagaaatgcaagtcaaaaccacagtgagataccatctcttgccagtcagaatggcggttattaaaacatcaagaaaaacagatgccagtgaggctgcagagagataggaatgcttttccactgttggtgggaatgtaagttagttcaatcattgtggaagatggtgtggcaattcctcaaagtcctagaatcagaaataccatttgacccatcaatcccattcctgggtatatacccaaaggaatataaatcattctattataaagatacatgcacgtatatgttcattgaagcactattcacaatagcaaagacatggaatcaacccaaatgcctgtcattggcagactaaacaaagaaactgtggtacatatagaccatggaatactatgcagccataaaaaggaatcagatcatgtcctttgcagggacacggatgaagctgaaagccattatcctcagtaaactgacaaaggagcagaaaaccaaacactgcacgttctgactcataagtgtgagctgaacaatgagaagacatggacatagggaggggagcaagacacactggggcccgttggggtgaggagggtgggggtatggggagggagcgcatcaggaaaaatagctaatgcatgatgggcttaatacttagatgataggttgataggtgcagcaaaccaccatggcacacattgacctacgtaataaacctgcacatcctacacatgtaccccagggcttaaaataaacagaaacagaaacaaaaaaaaaggaagtaaaaaataagcctaaaaggaaaaagtaaaattttttctatttgccgatgacgtgatcctacatagagaaaactcaaaacacgtcataaaaattgttaaatccagtaaagtagcaggatacagaatcaacatacaaaaatcagttgcatttctttacaccagtaatgatctatctgaaaaagaaatcaggaaaacacaatccatcataatagcatcaaaaagaataaaatagagggtggaacaaggtggccaaatagaaccttccagtactcattcccctgcagggacatcaagttcaacaaatatcctcacgagcccaggcggcacagtgtgaagacagagtctacctccttaggaagtaaaaggaatgttagtgtgggattttgcattggaggctagtgctgaccccactgcagtggaacacagcactgggcagagcctccaaggcccttgattctaggctggaggccacagagggagcatttagacccccgccccgggtcagagggaaatctgctacctcagcaggaggaatccaagttccagtccacttcacaaccacctaactaaagtggccttccgccagaccctaaaacaaagatttgcattcaggtagattatttggaagatgatttaaggacgtaccagtgcaggagttgtcgcgggacagtgagaccagggcagtttgacaatcaataaagggtgcatcattggcaagctacctgtgaacaaagggagcataattccactggacaacaccaggaggcagtgttatacaagcctaagggtaattccacctgaccaggtacagcacaaagatatgtggcctccaactcccaacatcctgggctgaatagtggtcccagacccatagttttcaagtctatctagcctgcctgaggacatgccaagagaaagccttcgcatagagtcccgagttcacgtggcaggacgccagaggcatgttctagaacagtaggtgccgaaggcacagcacaaggaaacactcactggtggaatgttctcaaaacaaagaaatgataaatgtttgaagtgatagatgtgctaattatcatgatttgatcattacacaatgtatgtatgtataagaacaccacattgtaccctgtaaacatgtatattgggtcaataaagaaacaaaaattatgttgtatagagaaaaatgcataagaaacagcaagagttgtagatcaataccatgaatgtaaataaaaaacaccagcataaacaaagccatatgacatatatcaccctcataccacacacatggggctctttcagacacattgcccagtgccttcaggtagagaggccagtgggaatgaggatgatggatgaagggaagaaaaatttttaaaagaagtctaatgggaactgatgaagaaagtataccataaacttggagtgtgattaaagccttccatcttcctcttttgcctcctctaggttaccagttctgcttttcctggacctgttccaagctctcacgttccacatcacacatgggacatctagtgtcaggctcccagagagcaggaaccaggtgaaatataagagcacagtcctcccagccggtggcatggggataatcggacaatacaactctccacccttttttatggtaagatatgaataaggggtccacaggagcaacctgagtccctgcaactacatttcccaggggcccctggggtaaccctaatgtgactctgggggcggggccagttggacatccaatgagagcacttcccctgcagactttggaagtgagagcacttcctcatagaccttggatgtgggaggattgcattcagtctagttcctggttgccggctgaaataacctggtaagtggaactctgtaaggggctttgaaattggggtttaatcctatctcaactgtgagtacaggagagtaggttctacacgatgtctacatttcaagtataaggttgctcagaaagtgtggctggcacatacttggaagctaatgctgtcactactccacagcttagtggtgacagttacaggtccttgattcaaactgttgggtttacagtcacagccactttatagctgtgagaacttggcctagtcacttagtttccctaaaactcagtttctttttcagtaaaatggagctacgagtactgcttacttaaaggacttgttgtgaggattacatacgtgtattaaaagataactaatgtgtttaaggcaactttctcaacaggatttccctcttggttacttgtaacagtgacgctcaccctcctctgtccccagtggtgtgtgtcccaaaggacccagttaatcctacaggcagcaagctcgtaataattcctgctcctcttgcactagctgataaaaagcccctaatgatcctggatgtccaggaagattgaattctgttgtttgcaatgcctatgggaattccagagggaagtttttgtttttttgaggcagagccttgccccattgcccaggctggagtgcagtggcgtgatctcagcttagtgcatcctcctcctcctgagttcaagtgattctcctgcctcagcctcctgagtagctgtgattacaggcacccgccaccatgcctggctaatttttctatttttagtagagatggggttaatttttgtatttttagtagcgatggggtttcaccgtcttggctaggctcatctcgaactcctgacctcaagtgatccacctgcctcggcctcccaaagtgctgggattacaggcgtgagccaccacactagggacgaagttttattatggccgaaggacacttactggagagggtctccaggaggtatgaatgacaaaaaaatttaactccttcaccgtcagaccgagagcatcaccccctgaacatggacttgcagaattccacagaagagaggagactggcctagacagacagccccaggagctgagggcccaacaggctttctaccctggatgctgctcccatgccctgacatgaggcccactacaatggtatacttgtttgctctttcctaattaagaaacaaacaaacaaaaaatcagacatactgtttgctcttgaatgcttgaaacacaaaacaggtgacaccaccttcctcctcaaaaggaactttttaactgtcaactttctacctgcacgctgcccagagacttattttgtctggcccttgctgtcttcagcagtagcagctgtttttctttagatttgcttttctggcctggtgcaagtaacccccaccacctgcctggccccagtcggcattaaatgggagcagtgagtggccttctggacaagaacaactgttgaatgatggtctttgggtgcggctagtccagcaaccccttttcatccagaggcccagtgagctggcttaggagggggctaggttgtagtgtcaatttagtgggattccatgcccttctttcatggtggtagaggcaaaagaaaagagaaggaataggaaaagaaaagaaaagaaaagaaaagaaaaaacacagaaagaaaagccactcattggctctccttgtaattcttctaatcattaatgccagaaatctatgcagcaggcgtagatgattttatctcagtccacaattgtacttgtgctgattgtagccttaaggccttacagccctatctcataggcagactacctctgggttaaactgcttttaattcttctatgttgggctcttgtttataacttttttaagagaaagaatacaggtttctttagcaataaagaaaaagaaaaccactgctgtatatttaacacacatcgattctagagacctggaattgaacaatgagttctgcatatcaacctgctctccaggggtaccaatccaagaatgtgattattgaagtgccaagtcacatagggataaatcacaatagttggtcaactgttgaatcttgatccttcaactaaacaatattcatgaactctgcagaaaaacaccagcattttgctcaacattcaggaccctctagaagttgcctcattctactctcctttcttacctttcttttacacagctctccaaaatgtccacaaaagtgacttaagtcaggttcccccaaaccagacaccaagacaagaatccatgtgtgtgtgactgaaggaagtgctgggagagccccagctgcagcctggatgtgaactgcaactccaaagtgtgtccagactcaaggcaagggcactaggctttccagacctcctactaagtcattgatccagcactgccctgccaggacataaatccctggcacctcttgctctctgcaaaggagggcaaagcagcttcaggagcccttgggagtcctccaaagagagtctagggtacaggtccgaaagtagaagaacacagaaggcaggccaggggcactgtgagatggtaaaagagatctgaagggatccaggtaagttattgaaagtattctttctgtgctaaccccagtcctcaatccttgccagccagccccgtcttccctcttaggtaccctgagcaggctctattttatgcccttccatacctacggtggaaaccaatagggtttttttttttttcagacagagtctcactctattgctcaggctggagtgcagtggcacgatctcagctccctgcaacctccacctcccgggttcaagtgattctcctgcattagcctctcaaatagctgggactataggcatgtgccaccacacctcgcttttttttttttttaattttttattagagatgggggtttcaccgtgttggccaggctggtctcgaactcctgacctcaagtgatccactcgcctcggcctcccaaagcgctgggatgacaggcgtgagccattgcaccaagacccgataggtctaaggggtctcatttgagtcattgtatataaatttttttttcaatgttttttgtctaaaaaactttagacagggaatgcactctccaattaccttcaactgctacctctccttattttattatacctagatacatcttgccttaacatttcaataatttaaccagaatatgttctgttaaaaatcttttcattggcgggccatcagactgggtgactcctgtggtttcattttcactcattttactgtttaccagtaaacagtagaaaactagagacttcaccaatcagaaactgtcaactaacctctaactagggacttttcactctaaccaaccaaatagcttttctttgtctcactcctgcaaacattttataaaagtttctctcctgccctctcctttcctcagcagagcattgagccacctgtagtctggtgctgcctggctcatgaattgctatctgttctaataaactttaaaaaatgttatacctaaaaaattatcttttaacaattccagtgttgacagtactggattggactctcctagactctggtctttcttgatcttcagatcaaatttttaacgtcatatttctttttttttttttttgagatggagtctcactctcgcccaggccggggtgcggtggcactatctcggctcactgcaagctccgcttcctgggttcacgccattctcctgcctcagcctcctgagtagctgggactacaggcacctgccattgtgcctggctaactttttgtatttttagtagagacagggtttcaccgtgttagccaggatggtctcgatctcctgacctcgtgatccgcccgcctcggcttcccaaagtgctgggattacaggcatgagcaaccgtgcccggccctaacgtcatatttctatctccatataagccaaaatggcttgttcaaaagccataactctcataacttttctactctttgttctgtattggaaggagtcagtgttcaccaacactcctttagtgtgacctctctactttttggttttcatattcatctacttgttcactggccatgaaaccgaaactatcaggatagctcagttattgcatttctcaagctcttttatgtttgatattacctttatattcatgttgcctttatgatcaagtgaaatactagccagaatatttggagcaaactctttcccttcaatactttgaagatacacttctattacttcaccagtggatatttttgtgtaacattctcttgctgtcctgatgttttctctttcatgaaatattttctttctctgccagaggcttgagtagttgtctttaattttgacttttaataatttaacaaaaatatattccagtggcaaacatgttgtatcgaactttcccagaattttctcttttgttttttagcttcaatttcttcatcatttcaggaaaatatttatctttacatacatttttcttaacttttaaatccaggggtacatgtacaggttcgttatataggtaaacttgtgtcatgggggtttgttgtacagattttatcacccaggtattaagcctactacccgttagtaatttttcctgatcctctccctcctcccaccctccaacctgtgaaaggccccagtgtgtgctgtttgcttctttgtattaattaattctcatgatttagctcccacttataagtaggaacatgcattatttcatttcctgctcctatgttagtttgctaaggataatagcttcccgctccatccatgtttccatgaaagacatgatcttgttctttttagtggctgcatagtattccatagtgtataagtaccacattttctttatccagtctgtcactgatgggcatttaggttgattctgtgtctttgctattgtgaagacatgatcttgttctttttcgtggctgcatagtattccatggtgtataagtgccacattttctttatccaatctgtcattgatgggtattcaggttgattctgtctttgctattgtgaatagtgccatacatttttctattgcactttttgcattctccacttcggaagcaccaattgtctttgcattggcttgtccttgactgcgttctattttattctatcttaattgctttatcatttcattagcctttagtaggaatatcaagcttttctgccacataagcaatgtgatacgatattgtatctatatggttcctttctgttcatcattatgtattctgttgattaattagttccatttctgtccttaattagtattctaaggtatgaaatctttcttttcataaaactattattttatcactttatttttagctgttttttattgagtttatttcacatggtccatagccccagatacctgtacaattttttttttcagtttatttttcttcttgaattggttgtggtttttttgtatataacttttgcatgttatgtcttttcttctaatcccaatctcacagtattttgattttgttagttctcatcattttcatgtatgtatagctctgtttccaccttttatttgctgcttgaatctggtgtggctggtgagatgtccagctggggttggtgtagacttgtcaattgaggaaaatgacgagacgagtctcaatcattttaggagatttatttgccaaagttaaggatgtgggcctgggagacaggtctatgcctttctctgaagatgattttaaggactgcaaatttaaaggggaaaggatgggatatcgagaagcaccgttttcatgtaagagctgggtagggaaaatagtgattcatggcctttggctcagtgaatgtgcttttttttgcataagatgacataaacaaaaggggcagaggaaaaatgcaaggactctgcattttacataacatacctggtggctcagatgctactcttttagctgtggtttcagccagttggttaccctgactttctgtggtgtctaattttgagtgacctgggatttttataattgccaaacgttttggttttagagtagcttctaacagcgctgatacttgctgcccattttctatgggttgccctgagtaggttaaatatcctctctctttccatagcatcccaaagttatgagcaaccccaaaagcttagcggctgtcagtgtaaatgtttgcagccttgtcttttgccacttgacaagctcgagtcagggcaatcaatttggctgcttgaaccaatctggcatggggaagaggactggcttcagttacctctagtaaggaaaccacagcatatcctgctctaaaatgtccattttctcatcttcaataagacccatctgtataccattctatctcagcattatccagtggcatcgcttataggtctgtcctgggggtgagaagttggtcagtcatcagaacacagtcatgaggggtcttgttggaagggcctggcaagagagtggctggattaagatgatagagcaggaaatagtaatattgggagaagataaaagcaaaatttcgtaagaggctaagcagttgacagacagatactgggtatgatgagaatttagaagggtctcaataggatgtggcacaaaaatggtaagggggaactcataagaactcataattatttcttcaacagacgtgtacagaagggccatgctgttattactcttacacaaggaggcagccctcgagccacagggtccagctgttggctataatagcctaccggtctctgatgatcaccatgtttctgggtcagtaccctggatgcagtacctccagtttcgcatacaaaaagggagaaaggcaacttgtagattgggtgctgtgagtctggggaattagtgagaatttcctttatttgttatataactggttttccctctggagtccccatgatgagatcaggttgttcattttttaggtatgcatatggagggtgagccacaaaggagaaatttggtatccagtttctacaacagcctgccagtccccgaaatcctctaagttgtttcttagtgatgggcattgggaaagctaaaatttctctcacattatcagggttaatactcagtcctttgaccaagataatatgccccaaatacttaacttccggtaagcacagctgaagtttgtcttcagacgctttgcgtcccttgctggctgagtaaatgtagactatcttcctgggaggaagatgctgtgcctggacaaaggagaaggtcatccacatactgaacgagtgttgagccctggggaaaaattaaatccactaaatcagcttttagtatttgggaaaagtaagtgggactttctgtatacccttggggcatgacagcccacatatattgccattctttccaagtaaaagcaaacaaatatggctgtctggatctacaggaatactgaaaaaggcaccgcagagattcacaactgagaaatactggctggtagtgagtatagctgataaaacggcatgtgggttggggactactgggtgcctgggtattacaatattgtttattgccctcaagtcctgcacaaatctccattttctcctgctttgtttctttacagggaacatagggctgttgcaggggctggtgcagggaataatgagcccctttttagatagtcttgtataataggggcaattccatttgcggcttcctgctatagagtgtattgtttaaggctaggcaggggtttctttggatttatctctacctttattggagtggctgagaatattttccctatatctgtattgactgagaccgtaagtgggaggagacatccttgagcaagcgttcctcttctggtgttaacaggaagactggggaagctaaaaggagttttaccgtttcctgctctttattccagtgttttctcttctcctctattatttccttctgtgtctctatttcatattcccggccacaagacgatgtttcaacactactagtactaaattgtggtacgttgtcaggacattttgtaattcggtattcttggtctcctggccccaattctaaaaaaagttcacgttttgatgaaaaaaagatatgggcattatggatgttgaggagatcacagctcaaaagattgacaggggccccagggcatataagaaacatatggtacctacggagcatgtcacacacaattagagcttgcggcgggggagctgaacccgatggaattgtaaggtataggtttggacttaaaacgtgagatcattttattagacgcagccaccatgttaattctttcattactctgaggaatgggctttctaaatcaggtgggatttatcagagatatagttgtgtctgtgacaattaaggcagttgtaagctcatgatttattattatattaatgtctcccaatttgtttgtcatggtgaagttttaacagctcactaggagttaacttgtgggcaaaatatgggggaggcatgtggcttttcatcttgtagccatcttattcaggaaccaaaaagggggaggcaggtttgcatgacccacttactagcttgacttttccctttggctaaatgagtttcgggggtcccacaatttaatttcctttcacagactcctcagttttctttagtggaggtgaggggaggtggctatgacaagagatgctctgatagcggatcttctgtatatagatggtccttgtttcttttgagtagcatcatacattaagggccttaccttgtttatctgcctcaacatgccgaattatagctgtacctagaggaagaccaggtgctagcactacatcctggtctttgatgtgtttggtatatgtcatggtagtgactgggggcatggaacttggttcacccttccttgctgatctcatgacagttcatcagctggtgggttgcctcgggaggctgtggaagccccgctgctggtggcttccacagcttccaggtttttaagccagaaggctgtaccccatcagcgttgcacccatctccatagttgtagtttccacacacttatacaactcaaatgttcactttactgtgcagtccattccctctgttttgtgatttttaggaaatcttcataatttacggtctacaaaactattattttgttttcaaggaagtcatgttatatatttctgactgtcttttctcttatttctagaattcaagccaggaagaagcagcaatctgtcttctggattaaaactgaagatcaacctactttcaacttactaagaaaggtattaagggcctttctgagagctctcagtgggcttcctaagcacgttcactctgcctcctttaagtcttatatttatgatcaagatgaaagggagggatgtatcactgcacagagattctacaagtggatatataaagctaataatgttttcagtgagctcttctctggcaactactttccaagtgctttcagcattccaccttgaagcacaacgttaataatgcacaatttcttatgttcagccacagaatgttcacgtgtgatttggttacaacatattgctctatccaggcctctaacaaaactgacttctttcaaatggacttgcagttgctgaattccaaatcaacactttatcttaaaaacagaaaaggaggggaagggtggagggaggggaacagagagggtacaagaggcaaaaaaagaaaaagaggaaaacaaatgcttgtaaacaagttaaaccaaataaaagagatataaagtaatttcttaaaagaaggaatgatattctaagcaagaatcaaatatccaggtatgtataaaccgccttcgtccttttagatcggcttctctctcttctttacatactcagtacaaattctaggtgagggggcagagaggggttggcattgtctgactaaatacatcttgttctctctctgagtggtagaactttagagcttgaccaaatgttacgaaagggtgctggtggaagttaggatgagaagaaatgcaatctaatagatttggagaaatgatgttgtagacaccaagaacagagaaagttggaaactggcaatatggggaggatagctgggtcagaaaggaaaaataggagaatatagaagaaatgttatgagaagggaaaataagagatgctccacttatcaccattcatctcggggcaggtccctttgtacaaggtcatcctcaggccataccacatacaaaagagttatacctgaggtctgtacagcactgttacaatcatagtctcaaaaggttaaggctctatgatggcaggtttaaaaaaccttttctaaaatatttaacaaaataaggggcatttatttttttttggttcacattacctgaaagttaaaagatagctttcggcttcattcaggtctttcctcattctaccttctgttgtttttcatctcttggtaaacttggtgaactctttgttagtgttgttcttcagtaggttctcaccaatagctttgaatgaataccccaccagcttctactcaccaatagctttgaatgaataccccaccagcttctaccttgtagcagaatgtacacgcttaggtttcagcaaaagttcctcagtaaagtctcagatctacttagatcatatgttatccatgagccaagcactggtcctagagcatatgtgttcaaattggtcccacctagtccatgtgactatccataaggcgcaatatgggcagcctgttctctacacagtatccagaaacatcactttgattgtggcaaacattgctcaattacaacccttctctcaggcctctctcatttacatttctcatttcacttacagtaaaaaccaaaatgccagtcttagctccaaggctgcagttgcctgtcagatctcatctcagtccactctccttcttactcatgtgctccaattacccttgcttcctgaatgttttttgaacgctcaaggcagtttccagcttaaggccttgttattttctgttttcctacttggaacaatcctcctcacgcatatccttaggccttattctctggcatccttcaaatcttagcgagtgttttttttttggtgtgtttttttttttttttaaaccaactaatttaaaattggagctctccctctgtacttactgggtcctttctttactttagttttcccagggcacttactacaatctaacagattgcatgttttatccatgtattcaatttcctatatatgtcactccaactcccactaaaatataagatttttgagagtaagcaagcactagaacagtaggaaacacattatagctattcagtgaactatttcttgagttaatcaatcaatggatgagtgaatcaatacagttctttgagcgggaaactttgtataaggctcagctaaaagggaaattgagtgggtcaggtaccacggatactatacactctattgcatgattctcctgcctacatcagaagacgtttataagcctattttaaaggataccagttggaatctctcttttattaatcaccaagagaaccatgaacaagctgtttatcatttgactcatcatttaatcttgatttccagcttctcacacttgaaagaagacataatacatttctcacaggattctgggactattaactgaacttatgtgtgtaaaaggaattcatacaatgaaagcactagaaataattattatacttataaccattgtatttttacatgtttaaaatatagccataattagcctactcaaatccaagtgtaaaagtaaaatgatttgctttcgttttgttttccttgcttaggggatcatggacattgaagcatatcttgaaagaattggctataagaagtctaggaacaaattggacttggaaacattaactgacattcttcaacaccagatccgagctgttccctttgagaaccttaacatccattgtggggatgccatggacttaggcttagaggccatttttgatcaagttgtgagaagaaatcggggtggatggtgtctccaggtcaatcatcttctgtactgggctctgaccactattggttttgagaccacgatgttgggagggtatgtttacagcactccagccaaaaaatacagcactggcatgattcaccttctcctgcaggtgaccattgatggcaggaactacattgtcgatgctgggtttggacgctcataccagatgtggcagcctctggagttaatttctgggaaggatcagcctcaggtgccttgtgtcttccgtttgacggaagagaatggattctggtatctagaccaaatcagaagggaacagtacattccaaatgaagaatttcttcattctgatctcctagaagacagcaaataccgaaaaatctactcctttactcttaagcctcgaacaattgaagattttgagtctatgaatacatacctgcagacatctccatcatctgtgtttactagtaaatcattttgttccttgcagaccccagatggggttcactgtttggtgggcttcaccctcacccataggagattcaattataaggacaatacagatctaatagagttcaagactctgagtgaggaagaaatagaaaaagtgctgaaaaatatatttaatatttccttgcagagaaagcttgtgcccaaacatggtgatagattttttactatttagaataaggagtaaaacaatcttgtctatttgtcatccagctcaccagttatcaactgacgacctatcatgtatcttctgtacccttaccttattttgaagaaaatcctagacatcaaatcatttcacctataaaaatgtcatcatatataattaaacagctttttaaagaaacataaccacaaaccttttcaaataataataataataataataaaaaatgtattttaaagatggcctgtggttatcttggaaattggtgatttatgctagaaagcttttaatgttggtttattgttgaattcctagaaaagttttattggtagatgagtaaataaaatattgtaaaaaaacttattgtctataaagtatattaaaacattgttggctaatataatttgaaaaaaagtggttttttggaagacttaggatattatggtgctacataatttttcctcgatgctctcttcctctcatctttcttgtctcttaaattgctttacttccttgcacactttgccatacaagaatgaacatgagcttttcttgtgtagatctgagttgaaatcctgtggacactgggcgaattactttttagatctgtagctctgactcctcaggcataaaatgggaataatgcttttacagtttagtggcggaactaaactcccaaaattatttgttatatggatcaagtaataacgtcagtaatgtttttggtacaaagtcattatttaataaaagttattgttccatcttgcttgccccccca

SEQ ID NO: 10 - DNA, 149049 bp, Homo sapiens
gtgagtgttccctcatctcatgataccagtatttgcactgcagtaaaatgaatgacacacatgttggggttatcatctatggattcaattttgaaagtgagtatcaggaggcattatgtctgcacctaggaggctttatgctattggtaggtgggttttgttttatttctggtgatgagggcttttaaagatacatatatgtgtgtataccagatttggaggttttgtgtgtagattgctaaaaagaaagagagaagtgtgtagtatacttcatttttttttaaagctgttcgtttgtcagtgtggaggatttgttgtagagtgaataaaatgcctaatttgggaagactggatattatgaccatgcatttcaagtgatctagtgcattctttttaatttttatttttaaagatttttagagttgtgtaatccactgctccagttttctgggggagaattcagctttttaaatgtagctccttaaggaaatgcgaggaccactgtattgcatggctccaggaactcatagtcaagaactcacacttaaactatcctgctggctatgtgtacaatctccagaaatatgatgctctcaacattactcaaacattatgtaaaagtagaattgttaccaacaattgcagaaggcttgctattagtgaagttgttcattattttaataatgccatgcatctccatttaaatatcttcaccgactgcaaattatatggttattacacaaaataggtggaaaacagtctgagggtgtaaattacattcttgggccacatcaaatcaatttccttttagggataagaacccgggttcttaattcccagccatcctatgatgcacaccttcaattaaatttatatttgaaatgatgcttgatattcttttttctcaagtcctaaaaatagagtaaataggatgggctaagaccccttggttcatctaatctttcccccagtgtaggattttcctatgaaccattaaaagtgttataatatatgattgatattaattagttttctgtaaagtactgcactccttaacatgaactgaactagaaataaatatattaccatgaattaagattttattagttgcaaagaagaactggatgaaggcacctatgtgaaatcctaagtacaggcgtcaaattgaattaatgccagcactgccttgagattaatttgagtactgaataagaaatagtatatcataacataactgtgtttactgaatcgtttttggcatcaaaaactaaagctacattataaatgcaacaacaggcttttctcccttggaagagagaggcgggtgcattttgtaattaaagtgaatattaccctctgaaaaatgcttctagtctctaggaaggaaacagccttcttgagaacactgcatccttgtatatatctcagactttgcatacttggtgttgctctggccatcttcttcatcctagagtacggtcagctctattctccactcactttatatatttttgtcttattactctctatatgttttgcaacagatgtggagggtgctgaaaagttttatgggattgccccagggatgttctagaagggattgctgattttatagggagaatgattgcacagcattcaatacagggccatgcaggctgagccctgtgaagtcctgaggatcacttttgacagattgtgatgcgagtagcgccccctggagttgtgcattgctggggctctgctctactttcccttaataattctgaaatttcctgattttataaattttatatgcatctatgatataggttacttgaagaccaaatgcaaaactttaaagttttgtactgttaaataggaatactaggcacatcactcatctaattttaaattgtaaagtaactacatttttaaaaattttaaatttaattttaatgtctttgacttaatatattcaaaatattatattaacatatagctctaagttattaatgaaatattttacattctattttttgtattcagattgaaattccaggtatattttatatctgtagaacatctcaatttttgtttggacacattttaagttctcagtagccatatatgtggctagtggcgactgcgttggctggcatagttttggacttagatagcaacttgccagcatttcactacacagaaaattgctttaaagaaaaaaaaacccttaaatatctaagacaaaatataatgtatcctttatgtcatttatcaatttaagaagcgattatatgattgatcacaaatttgcgagaagtgtgaatgctaagacaatttagttgatagcccactggtggtacaatggactttatattgaattgttttgtcctgtggctttgttttcccttcttccctctgtgtgtatttcagatatcatcatttaaaacacaatttgatactttgtggttcctctcattgtcccaagctcatgctgtcttgtcagttttcatgcaccatatggatgtcttatttcttttcttttttcttttcttttttttttttttgagacggagtcttactctgttgcccaggctggagtgcagtggcacaatctcggctcactgcaacctccacctcctgcattcaagcggttcttctgcctcagcctcccgagtagctgggactataggcgcatgccaccatgcccagctacttactttttttttttttttttttttgagacggagtcttgctgtgtcgcctaggctggagtgcagtggcacgatctcggctcactgcaagctccgcctcccgggttcacgccattctcctgccttagcctccctagtagctgggactacaggtgcctgccaccacgcctggctaattttttatatttcttttagtagagatggggtttcaccgtgttagccaggatggtctcgatctcctgaccttgtgatccacccaccttggcctcccaaagtgctgggattacaggcatgagccaccgtgcccggcctcctggctaatttttatatttttaatagagaccaggtttcaccatattggtcaggctggtctcgaactcctgaccacaccagatctacccacgtcagcctcccaaagtgttgggattacaggcgtgagccaccgcacccagctggattttttatttcttaacagagaaattcttgaaagacttttggctcaaataactttgtggccagcctaatggaaacaaaaactgttttcttcacttgctgcttctggtctcttcagatgtagtgccagctcgggactggtatgaggctggattttatttttctttaggtaagtagagaaacaaacaggcacctggcattcctacaacttgtgataacactgtccctcatagaaagtcgacttactataggacttaaagagaacatctgatgtgcttggtttccaaatctttatttttcttaggtgaggaaggcaggtgaagagcaaagacttgcatctactgtaatgttgcttgattttacattgagttttaagcagtcaaacatgaatggcaggcatcattatggagtagctattatatgccaagcacttggcttatacacattttctttaaccttaacatgagccatgtaaaataggcatttatatttccatttttgtagatgaagtgcttgaggttcagatagtttaggtaactgtcttgagttcctacagatagataataagtaacagatctacattgtctgaccccaaagtccatgctctcagagaagagggacacattttccaaccaagtcaatgacaccgttcaataatgagttttgaaccaagaagaaagactaaaattttagagttgtaatattccttcacttcacttattcaagaaataaatgcagagaatatgtaatcctattctattttttgatagatgaggaaatagatcgagaaacttaaagtggctttgtgcaaggtcagacaaacaagcctagacatcaagtcctttgatttctgctccaaggctgtttgtctaagtggtttaagggcccctttaaggaggtaagttggacatttggaattttttttttttttggacaggcagcaaacttcaaaaatttatggtatagaaacatttatttctctttcttttctatgcattttaaacttgttatcgaagtatatgatactgaaaagtacatgtatcataagagtttagctcagtgaattgtcagtaacaatgtacccatgtaaccagcacagacagcaagaaagaaaccctaactagcttgctggagccttcctcccggttgactgtggttctccctgccctgccccaaaccaccacccatggcaacctctcacctgatttgcagccgcctaggttaaatatctgtttctgtgctttatagaagtggaattataacgtatgcaccttttatgtgtgtctggcttcctttgcttcacattacatttctgggatttatctacattttggtgtgtagcagaagttcattaattctcattgatatatttggccatactttcaagtataaaatccctaacaaccataatactctaagtggaatgaataggtttatttcacattaattaatatttaaattgcttttttcctagaaaattattagctgtagttttgtgtgattcgggctaaaacaaaataacaaagctgaaatatggtgcgtcagcagttacaaagcataacacaatgcaggagatcactcctgtcctgtggttttacataataaataacattgaatgatgtcatagagaagacaaagagagcacacaagctgaacatacccacaggagagccccaggtgggagttcccacttagtggctttgtatggctgtacaaaatgttaggtgtggcctgtttttaggtggcctgcatgcaaatggatctactaacatggatggtagaaaggtccacctcaggggctaggcgcggtggctcacacctgtaatcccagcactttggaaggccaaggccgggggggggtggatcatcaggtctggagttcgagaccagcctgaccaacatggtgaaaccccgtctctactaaaaatacaaaaaaaaaaattagccgggcgtcgtggtgctcgcctgtaatcccagctactcaggaggctgaggcaggagaatagcttgaatctgggagacagaggttgcagtgagctgagattgcaccactgtattccagcctgggcaaaaaagcaagactctgtctcaaaaaaaaaaaaaaaaaaatacccacctcaggaattgttaaagttgtttttttgttttgaaaagaggtagagaaagaatttactctgatcacctgcttggtgcaaagtacaatctggacccttcaaagaataatagaggttttggcttgtttaaaatggatctctcatcaacctctttttgcagattgtctcacaagcacagaatcaagatttgctatgttagttttcttattgcttcttcttcctggttgcaggaaaatgtgaatgtaatgccagtgaatactgctagtgagaacccagcattgtgtgagaatagctgagggtttatcaaggcattgtcctgactgaggtttatcatttacctggtcatactttccttactcctatgttgtcagtgctccctctcctaatttctggtagagaagttaattttcctgtgactaattcactcaaccttaaaggaaaacctccaagctggttggtcttaggtggcatcaaagcatacatcttctacctcttgctcaatagagtcgtatgtacaaaggaaaaagttgaaaaggtaacgctatcctgtgatatggtcttggtttaatacatttgctaatactgttatggtaaaatattaggcatatgaccttttttcctccctccacaccctacatgaatatctcagctgattccttctaaattaaaaatatgtacagtcttttaccaaatataatgagctttttatttaaggagggtcttctcatattaggaagaaaggatgttattttaagctctcatttccttagctgctgtagaccttattcttatttacaaaaccctgaatataatatccacccttctttctaaatcttctctctctgggtgacaccatttctaaatcacttgtaatgactaccacatcagttgtgtggttttcacacttgctgtgcatgcagggactcggtcttacatatgactcgtgctactttccagaattaatgataaacaagatgaaagcccactgtttctctggacagctacctgagctttgtaagaaatgctggtctctaagaagctgatcttctcagagccaatacctgtggttgaaagtattatatttcacaagttctctagtattctttttctagaatcgttgagtggttaaatatctgtattgcaaggaaaatgatgaagctgtgctctttcagcaacactgagcgccagttgcctttcttgtacaatatctctgatttccagtatctttgtgaaatgagacatttggattcaccctgtgcaaagaaggcttcctgagttgtctgtctctgtcaagacaggcacatcactgcattttagatctggcagagatctttgatttaattgaatccggccatctttgttgacagataaggaaaccgaggctcagtatcattacatgaatcacccaaagtcaaattgctggcaagtgacatagctgaatgagggccatgttcttcttaccatgcactttcctttcattttgggctgaatcaagatcctcaaagtgactccacctgtcagatagacttgagtctccagtactcaccttaaatctcataaggctggctgactttggtttaaacctcattactcctcttcttacaaatattcttaatggtcaaaataacaaacacccatgtgtaggaagaatgatctgcagaaaaggcccaggaaatttgagaacatgaaatcaaattggctgatataaagctttcattcctatgaatatagttgaccttccaggggaaagaaagtgagttatcccctcttgtgatatttgagaagccaaacatgagctttctgcccaagcacggggctgcaacatggcagcatttacacaggttgtttcacatttagggatgggctgtgttccagaaatttacttgtatgtcaccgggttgaaactgggactgcattttcctggtcaaatcaatttcagtcatctccagtggaagccatgtctccaaacactctttctctaagcctttgctggtggcccctccttttttccccagttagttggtagaccctcttctcaagaattattcttacctatttatttataccattcttgaaaatatttactattgtataaatgaatgaagtttctttaaccccacccgggctaattaagatttttaaagagaaaattgactttacaattgattaaatttcagattgagaaacaaagggaagatggtagtcatgtctgggggttagtggttttgggtctacctctgaggcaagctgatagtagctgatagcttccttctctccataattctgggatttctaagtataccaggtactaacttccctcagtgttgctcatgagctttgcatcctaagtggagcagctgttggacttggtatgacaggcagaaatggcttcattttaaatatatgatgcatatttgagatataatattgggcgtcaggggctatttctatctgctacattcccagtatgttaagcaggcatggctttaatactgaatctctctgttcctctcaaaactgaataattcttcttcttctgaatataaaagtcatgcatgtttataagagaaaatttgaaaattacagaaaggcacattcacataaaggaacgtaaaaagtacttataacgtcgtcagccactacgaacagcttgttacatttcctcctcatcctcttcttctttctgaggatatatttttacaggtaaacttttcatgattatagttttttcaagcttcattttaaaccctaatgtattttgaacactctcccattatgctattaaatatattttacaactgattttaatgataatattaaatataaatatgtgtgtgtatatatatatacacacacacacacacacacacacacacacacacacacacacacatctctataatttattgaaccaggtcacttaatgttggatattcacattgcattcaagttttcaataatgcaaataatgtcgcattgggcatcctaatatgaaaaatctttgtacacattcccttattattgccttaggatgaatttctagaagtagatgttctaggtctatgaggtttttagaagttttgaatatatattgcctgcttgctctgtataaaaattatacccagtataatcctaccagtagtatctgacatctatttttcgattgagctgctaaatgtagaggtcaatcctagaagcggtcgtcttggttaaggatgttttctcaaaagtcttgtgtctaattgggctagcaaatataaagtaagagtttatctgtcaccacaaaactgagcttagacctcaaagctaattgcttcttaagatgagaatttatttcccttctacctctccgacatgtttgggatatatgtatatacatatcagtttagctagagcaaaattcaaatatcaaagcactggaaaaacccataacagaaacacaagtcaaataaccaaaaatctttccaagactctgcctggtggtattaaaaaaaaaagaaaaagaaaaagaaaaaaatatatatatttattgttacctttttgagactatttgcaaaatacagttttgttttgtttctctaagatcgagaaaagctaagctaattagtactcaagcactaaaaaataagtatcacgggaatggtttgattgcttttttttttttttttttcagttaaacaatttgtgtaccttaattttccctggcacttactaagttcagctagtgtgaaaaaaaaaaaatccttcttagtaaatgaaatgttatgttatgtattgaagttctgtagcactttaaaattttaaatagtgccaaatttgacaatatgtaatatgccttgttcagttccacttaaaaaaattgctagataatcctattgaacatttattgtctaaataatcaataactgtctgcattatagataaattaacctggaataattaaggtaaatgaaaatgtggattcacaaatacaaccgagttgaacatcagacaaaatcagattttaaccacccttttattatctcttatctctgtgcttaataagtacaattgttgctttaagtttagattagtccaattgactgcaactcagattaactttcatgttattttttgttttaatatgaaaaacaccaaaagcacattttgaggtccaaattaaaatagaggctgactcagttccatagagccggtctgcagaaggttttactggagatgagagatgtttttgctaaggttgtctatcataacttgtttattaaaaaaataaaaataaatgctaggagacattcaagctgtcttgattttcctctagttatttcctcaaaggttctttgttcacatggacatcactgtggcatttttttcaagcaaaatgaggtttaattttatagtatttatagaatagaagtctttgttatatcctatcctgctaccaacttttgtgttctatgcagtctctgcttctaaccagaggcccaaagcatgtgtttagaaactgatgtggggtatcaggatcaattagtccctctaggaattaaaagcaagcaattgaatgcctgttaacaatgactaacttgaaaaatattagcaattctaggcaggcccctttgctttctggacgaatgctctaggcaggcagcattcccaggaatattggtttccagctatgtagactgtccctcagttataaagttgcctccagggtctttgctatggctttgatttgaggatgattattattcttatggatgaaactttagttcttcctagaaaggctttcagcgatttgcatgctctttccagctgccctccaaaccttgcccagccttatttttctccatcataaaatgggtacacaggtcatttttattggatagtttggaggactaaattgactgagatgtggtatatgaagtgctgatcttaatgtctagcccatacgtggtctgctgtatatgtcttgctttccacctttctttcttgagaagtttctgcatacatatattcttatgtagttattgtataaatagtgtatatggaaacattcccgaggttgtattttcctgttctttcttgatttagaaaactaaaactacagtaattttctgctgtgtgtaagagagaaaatgtgcttatgaactgtattcagcaaacttaaaatgttgaagctcttggtcacctttttatgcccagtaatgataaactgtcaatttgcttacgttatttgggaatttactagcaacttgctgcagatatcacagtagacacatctcttataatatgtatgatctgaaagaagcagcagtctggtagttttttgtttgttttattaaaataaaaacttataaacttataaaaacaaatgaacaaatatatttatcctaatagctcttctgagtttgcttctgaaatcacctatattcaatatagacaacaaaaccaattgtttttgctattctctgaggtttttgagtttgagggtttgaatttgattctaatttttagaaatgggcagttgtctgaaatatggagggatgggaaaagcctttaatttggagtaggagtgaggaaggaaacccaaatgttatacacttcagtcaacgtatttgttagagaattgaattattctcttgaggtttttttttttctctttgttagcaactcgagatagattctcctgcctctactaatattgaaaccctggaaaatgttaacagaactacagaggggagaaattatcaggatggaatgtaggctttgtgtagatatgcaacattgggggcactcagcagatgttaataaatacctctttctattgttgagaaaaaatgggtttgatttgggtgtgaactgcagtggtcaatgaaaggaacttgtatctcaccagggtgtgttttaagcagtagaagaggaatctgggtgttgatccaagtgacgttggtttttcataccaaattattccccatttttaagggttgtcatccccctaaaattgtaagctctcttgtgtccatgtcatatgctttcttggcagtccttgtgatacatggctgtgcacacagtaaggtttcaatagatccttgttgtctgaaaccagatatttgggaattttggagacagagttgacgaaggggtgaaaggagggctgtgggtagagagtaagagaaatagtcaaagcagagagagaattaaatagagaaatggcccggggaaccagaaaaaaaccaaggttggtgagcaatgaaccatttaagttctcctgagaaaagaaaaaaaaaaaaactggactgaagaaaaaatttaatctgaagagttaattaacaaaattataaaacctctaaaacatccctctcattacagttgtagttttaagacaaaaaaaaaatatcgtggaaagcactctaatttgtcctaggaatctatttaattttgatttgtccagtaatagaaatttgagggggaaatgcaatatactgtagtttatgagtcttttaaatgttgttacttctgaattccatcctctttgtgatagtgagagtgaagaaaacacaagtgtatttgaaatcacttctggtttcagtgcatgtgctgatttgattttttagaagtagaattagatggcaaaaaataagaaaaccctaacaatacaatctgggcaggttagaatatcaaaaattataacgagcctgttctaatgtaaagaacatctctaaaagatgtgaataggttttaaaaatatgatgaatatctagcattggataaacacaaataaaggtatcagtgaatatcacaatggaagaatcacatgataataattaataaacattgactcttcttggccaggtgaccaatattatttcacagttgatccttgagggcagagccaatgacctttgtcctgaattttaataatttactgaagttttacattaaatcagaatataattgggaagaaaattagtgtttctttgtggggagtgcagagtaatgccactaattgcttgtataaaagcattcccgaggttgtattttcctgttctttcattagaaaattaaaactacagtaattttctgctgtttataaaagggaaaatgtgctggtgaactgtattcagcaaacttaaaatgtcaaagctcttggccacctttttatgcccagtaatgataaactgtcaacttccttacattatttgggaatttactagcaacttgttgcagctctcacagcacacaaatctcttataatatgtatggtctgaaagaagcagcagtctgctggtattttgtttcttttgttctttctttcactttaatatttgagcaatttaatatttaaaatatgtgttagggcaaataaccatgtttttctgtttaaggagatggacaatgaagaacagtgtaaattaacctcagtagaataatgctttacaaattatatttaggtaactgggggattgttttcaggtaaattattatcaagtaaaagaattgagctgattctaaaagtatattgggtttaacattttatgaaaacatgtttattcacacagatacatacacgtgtacatctcctgggaacttggaagggttaagtcagaccactgtcatgttacaggaagtgtttttccactgtgtccagtaccttgagtttgttatgtattcaatatgtagtgtcatcataaaacagttgcacctacctgcattagccctcattgtctcaaggtacaagctgaaaaataatagaaagtaaagctcaggaattgaatatttctgctaatagtgtgttggtatttttccctcagttcacagacattcttgatttcaaaacgcaaactacacaacccagggcactagggttggaattcaatgtttattcaaaaaggcaccctaaggcagttagggaggaaacgctacatgtatgaaaaataggagccgggaatcaaagctgatctgagcagagcagcagcgactgtatttactaacacttgttttctgggagcctatgagagaaatggaaataattagaaggaagctgaaaggatggggttttgtggcttgttctccttatatggagcaaagaaaactgcagcaactcttcgggagctggtattccctactgccatgggggcagccgaattctgggtggaggagtttgtttataccttaacacatacaggctattttgttgattaaacaagcaaaaaaaaaaaaaaaaaaaaaaaaagccccgtttgcgctttcaaacactccctcaatgagaaaatgtctcataaaaatgcatcatgtgataagctcttgctttagtcccaaactgagcttgagtccacttggagatcttagaattaaagagttcttagggaatacacgttttagctaagaatatagttactctgtcatgaaacagggagctttgccacttgcttgttttggaaggaaaataaattaaaaaaagattgcaggggattttggttattatatggccagggctccgtttagagtctgtggcattcaaagctggctttaatcacagcatgatgcttgaagcctccaaaagtctaagtgtttcctttctttctttcttttctttttctttctttttttttttttttaaagcgttacttcactgaagcagagggctgcctttgagtgacgtcacgagttagagcagcaagctgcacaggggaagggaggctgggtgagtgacagcccagcctactttttaatagctttgtcatgtgactggggactgtagtaagacaggtgccttcagttcactctcagtaaggggctggttgcctgcatgagtgtgtgctctgtgtcactgtggattggagttgaaaaagcttgactggcgtcattcaggagctggatggcgtgggacatgtgcaaccaggactctgagtctgtatggagtgacatcgaggtgagctggggcagggctcggcgctgcagccacaactgacgcttccctcagatgctattattcctgtaaggggggatgggcttgggcaaagagaggagccaggaaagtagtccaggcaggagcttttagaagaatctcaatcttatcttaactccaataagtttgctattttaaggtggctctgagatggcttgagcaaatcaaagcttagctgctgtcatcagtatctgttgcagttagaaactctttccatgtgactttggcactgtttctactcatatgcaatatttatgctctaagatattgatatgaatcagaagctgaagtctttccagtggtgtttagtggcctggttggaaaaatgccatttctatttataataagacgaagataaaaatattaaaatggatgtgttcaaatatagtccgttttgactctagtccggatttttcccccctctctctctgttcatcagacagagaacttacaaaatcctaaataatcctgctgggctattttagattgcttttcccacagaacacaaaacaacgatgctgcttcctttaaaactcctatacgtggttgaaagatttggccagcgaataaaaagaaacgcctggcagtgcaaggttttccgttcgcgtcggtggcagggaagccaatggttaaatcttcctgtaccacggagagctgcctgaagctgagagagaatagagtttatgcaggactgtgtgtggagctgctcgctgctagtgtaaaaatagacagcaatacatcaattccacagtctctgctggctacaattcatacaggggggaaaataacgcaagcagtttcctcgtaatctctggagtctagtggggggacggaggacctcggcgtgtttgcattcagcacaatggaatgctctcggaaggaaagtttgggcaacttgggaaacaagcaaaactttctgtggactctggtgagatggactcgaattgaattgcatggaggatcccagctgctaacaatgaatctggcaaaagactgcgagtgtttcctctgggtagctgggggcacgtagggtaagggggaggatcaagcccacacgtgatttgattaaataagatgtccatgtggtgcagcgatacacatctaaagtgaaaataatttggccaaggccgtctgtgaatgcatttttcctatctagcgaggcatgcccgggattcttaactctttgctgggtttgcaaatgttggctccatttgccctcccttgccttggtagatcgtatttgtggattgtaattgttatcttgttctgatttcttggtaaggcggaatagatatggataattcatatgccctgtagccattatgagtcagggttataagtggcttcaaagtcctaattgcctttgagtagccggagtgtcctgtgggtggttgtctggctggcactgtgggtctcagctgctgtagtttcatttttccatcatgtattattcctgatgctgttaggagttgattgaggaactagatcatatggaaataaggaagatttattttaatcattggaattcctgcagtcattttcaaataaacatcagaagcatttagaatagtggcctttaaatttttttcttaaggaggaaaggtcttggctacttgtccagccatggatagagtcgccagtcggctgagattggccagtcacttctctgttgcactataggcagctagctgctagaagctttgcctacatggcagcggctctgggaatcacctccgcctgtataaaatattacgagcagcaggtagcgttggcagttttcattttttgaatcattaatgtttgctgtcatcctaaaacgtattatgcccttttgcacataatgacagggtagtacattggttaatataggcctatatcactatagctacttggagtgccccgtgtttcacagtttaatgaaggtgatatacagtaaggttactaagattgatagagacaattcacatgacatacaccccactaagactgtcattctttactgcccctctctccaccccctttcccctgtcttaactaatttttttaagaacccagtttcttttttcattaatataattaatgtggccaagtccactccttcttctctctctctctttaaaatttaccatcaatggcacaaaaacctccaaaaggttaatggagaattatacttaattataatgattcattatcatcagtgcagttaagctaatttattgtctgctccttaactaagagaaaagtctgttggggtgaaataacatacaataattagccttttgtgtttagtgactgctttatcctcttaaatcttattataaaattgaggctacagttgtgaaatagctgtcatagttgcaaagaggcagtagaatgtgtctgtgtaattgcaataaagcacacctgttacagaggtatagggaaacagtaaatatcagcatgtcagatgaggacagttacagggcttggactgttaagtctggcattgtccaaaggccaaatataaattaataacaggaacacttgctaccactaatgtgttttagattagcaggataatgccacattcagaagcacagattttattagcatgtcaacattggcaagaacacatgcacttttctcaaccataacataaaagcaaaatgagagagagagagagagcgcacgagcgaacaagtgagaggaaggaaaggaatatgtaaatgacaagatagcaccaatacaacaaattgacctggtcttttcaatggttttcaaaagttatttaaaaatacatatttatggaaggttaaagggttatgagcaagtcatgccaaagagggcagttaaagagagggacaggaagaagttgtccacaaatcagtatgctactttagcattccaaaacatggttggttcctaagtttcacaacaggaacttaagccatatgtagacagcctacattttcttgattatttttacttttgtgttgctatttttgttgttcatgttttttttttttttttttaaagactatgcccctataaaatcctagtgtatcttgcaccgttgaaaaagttctcccccatctctgaattggtgacattgaggaaaagttaagatagtgtgtttgggcttggaggatcagctgtgtgggcaagaatggagtctgggcagtgttacatccacaaccaaatatgagcattgtaccagaacgagatctcttcagcccagcctccagttacttatatgccttgtcaagtatactgatctgtaattttgggctaactcagataataaaaggaaagaccaataaaatgataaggaaagagttttgatggtgaggagggccctttctttgcattcccttgtccctgctgccagggatctcactggggtccaatggtcttagagaaggatggcaatgattttcagtctccccccatcctccccttaccaactgctgactccattacccagtacttacttctcagcgtgttgcttttgatcacgctgctgcatatgacctgtgtaatgtggcctgctaggaatccctgccagggataacaggggtgcttgagaaagaaaatctgcataaaacttatttcattcaaaatgtaaatgtcaaggagcatctttcattttatgcctaactgcagcctggatgtgaacaattccacagcatctctcctgaccttggaaggcagggccatgagggtgctgcgtcagtgtgtgcctcctgatttagacacccccacttacaggtggatgaagtccttactgttctggcaatgccagacccctgcaataggagttcctgcagtgttctttactgtctgcggactgacattagcggttaggtagccaattcaagtttaggagaccacctcattggtaaggggagtccacttgcctccaaaagccgcatggtaaaacagttaaaaagactgtctatttcatgtaaggggatgaaatgctttgacaatctaaaataatcttggtgataagcagcccagccatggtagagatattttaaacctctcaatatgtagaaattattttaaaactctaaacaaaaatagttattttgaattcacgtagagcacagtttagatatacataaataatgaacaaaatatagtgatggtatgctattgtgagttttcttttccaggtactaggtgattccaaccgtacacacacatacgtgtgcaaacacatacacacacacacacacatcttgcaagttacatacaaaagccgtatagaaaaaaaattatgatttttgtccttcatcttaaggaacttgcttttgcctttaaggatgaagtccagaaagtcatgaagagtcaaataagagtaaatgatttaaataacaattcaggagaaccacagatgagtcaaagggctttgcatcattagttgctaaatgaattatttggattataatgcttaaaaggagtgtaaatggagaaaatttttcctagtgtagttcctctgttctttttccatttagcaatagtttattgagtgtctattatgtgtgataaaatttccaaggtaaaatcaagtttgtattatggttaactataagacagtttaaaactttggaagcagtaactatcaaacaggtatcaaggattttgtacaaagaggtccaaaaatatctagttgatttctaactggaagaatcagagaaagcttcgtggagcttggtatttaccatgtgtttggaggtagcttttggatggaataaagcagggaaattatccttcaggagccaagtgagtaaagattttaggatgtttttcctggtgattaaagtgccagaaactagctttggtagtgtagttgaattaactaggcttaattcctatcacatgctattgcagtttaataaattcctgtggttaatggaagcttttttaaattttttttttctgcctcctgcagtgtgctgctctggttggtgaagaccagcctctttgcccagatcttcctgaacttgatctttctgaactagatgtgaacgacttggatacagacagctttctgggtggactcaagtggtgcagtgaccaatcagaaataatatccaatcagtacaacaatgagccttcaaacatatttgaggtaaggacatcctttggaaacattaatttttcattgagtttggcttgggcccgactaacatggtaatagacctgaatgcataatgagttcttactttgctatcatcaaaagacttttcatcacagttacatactttctaatttatggaaaaacagcatttggaaaacaaatgttttgtttttatttttttaaagatttaaaaaataaatcaactagggactaggaatcaacaactgtgagtgagttaaactgtgttgaaatactaaagggttgtgaaagattagtgacaaagaagaacaaaagtctaaacctgtttattcctgtctatttcccacagaaagaatgagcaataaatggtacctcatataaattaataaataagaaggcctttctttttaaccaagggggtagatgtctacctttgtttgctttactaattaggtgagctcttttgattattattattaattatatttttggttcatatctctaatttctttatataatgggaattgctaaacttgactaatctactgtatacttataaatcagtcaaaattcatttacttttcagtagcaagaattacctccgtgactccggactcttattataagcctaccctataataaagaatgttaatctattcctattaaagtgttactttgagaaaaggaattctttcccacaagatcagtactcatttacttgaaatacattattttttataggaacaaacatttagtgagtactctggcaagtgaattaaacgaaggatgacatatcggctagttttctttatcacaaccgccagtgccatcatcatcatcatctaatgttttctgagcacctactatgtgctggacttttcttattcatcagcaaagacatttcttatacttccatgttatttggttgaaatctgagtcttaagaaagccaagtttaaaatattaactgagttttgctggaacccagcatataatacatgctgaataaatgtttgttaaatcatgagagaatgatgaatatattaatgttgataacaataatagtaatgacaataatggccaacattttggtatactcatgcttaatatatgtcatctcacttatccttgaaaacaacctattgttaggtcctattgttatcattcctgttttacatatgcagacactgaaactcagagaggttatttgttttccccaaatcacacagttgacaataaagacctgggatttgaaccccaaatttatcggacttcaaagtttatatccttgataaaaatagagaacccatgaatttgggtgacagccatcctttacaaagacatatcaagctgcttctttgctcaatatatttaaaaatagaacagaatctttcctttcagtgttggttggcacggaggtagagttagctggtgagccgagacggctgtaggttctgcctatggctgagattttgtaatacctctggagattaagtgggttttagaagaatgcttaaggtagtagagtttggactggggagacagaacaaggtggagggaacactgaaggttgtggttagttctactttcccaggcttctcagccgggtcttagaaagttcatgtgaggacttggccagttagaactggtaaattgaacattcctcactcagtacacttgtcaagttacaggcccattctaagtcatgctgcattaaataaacaatgctttaaaaaatgtccatctccatagacctcttatctaaaaatcacctatttcatatcaggtgaatgccatgcattttgtagaggctagagaataacttagcggtaggggagatggcataggagtcaatgcctctctggtgggctactttaaaaaaaatacaactttctccataacttttatgtccctatattttgtgttgtggtatttgtgagaggtactttgcatttataccttcaggagacttggttcagcatctagttaattatctacatgtaggtgcttaatatatgccatgccaccctttttgtctccctgtatcatattctatgctaataaaattattttcagcactctaaaacagaagttcatttaatttagtctctcattaggtcattttaaaccaatgattctcaaccaaaggcgattttggtccccgccccacaccccaattcacgggacatttgacaatatctggaggcatgtttggttgttatccctggggacaaggggatgctacgagcatttattgagtagagactagagacaaggaatgctgctaaacatccaacagcctacaggacagctcccaccacaaaaaatgattcagcctccaatgaaaaaagcactgaggttgaaaaaccctgcttttaaataaagtcacaggcttcccctttataaattactaatgattaattggtcagatttctgagagaagacatagtaagctactggatataaagaatgagaagtcgtataacgatatcgggatgcctggggctccaggactaatatgtcaggtatcctcttagtgtcagagggcaaaagtgactgtttaggtaagttcccataacagttttctctgatgtcacaaagcccattctttatcgaggcaaagggtaaagtcatatgtggcaatgcccttaccaacagcagcagcttcaggagtatttgcatggcatgaggacacctccactctttgccctctagtgttaaactcaggcatcttttctgtaatgtgaaaggaaagcgtgttttcagcacaggtgacattctaaaattgggtcttccctgtgaagaaggttcgtatgaaaccagataactctttcatggccacaggtttgtgttgcttctaccaaagcagcatttcagggaagtgccttcccagggccggccactcacagtggacttttcacctgcactcaccttcttccaatttgcaaagccctgcctcatcacatttgagaaggccttgtacttgagtaagttaaacagtcacgggctctgctgtctctgatctgacaataacaagcattatctactttggattcccagaataaaatcaggcactgagtagttaaatgcttttccctgactcaagtagcacgtcaatgacaccactggaaactggccatcgactgaattctcatcaaagcagaaagtgggatttagggatatataatagagtggcagagtcttaaaatgttgagagtaaattatgtatctcttctttttgtttcttccatatgtttgaatctaagtttaatttttatttaacatcacaaacttaataatgataaaaaatgaagctgaatgtcacaatttgagaaagggaattctgggtggtggcagaggggtagcaacatgcaatagcacatgttggttgagtaactggacacgcaaacaatgttctctgcttacgcaacctgtgtttggatgtgtaaatgcaggtgaccaggtacgattcagaagccactttaaaaaacaaagcaaaaggctcagaggtaacagcctccagtgaatctgatccatgtgtaaggaaaacaggatgcgtccctggaccggctggtagcaagatttatgtttcagaatattgcaacataacttccttccctctgttgcctttgtgcattgtttgaaggaggagaataaaggactacttttgcagcacagcagtctgtaaagatggatggcatggggttagtttaaatagcatattggcctttctgggtcactgtgggcaaccttgtccctggtttattttaacacctgctttaatgcctccatgatacaactgaatgggcatctttcattcattcgtctgttacttctgaatgaagctacttggggttcgttagaatgatggcaagtgagaatgcagtcgtctctaggtcattacttgtaatacgttctgaggactgcctttgctgatggggggagaaggactctcacagctgtagccagcgttcatgtttggtcattgctggaactctcaggaagcctgaaactgtgaactttgtagcagaaaagggtgagtggtggttttgtatttgtgtgtaaattatcctgctatatgcaatcaaggaaatgaatgtggacgctttcaaggctacttggttattctagtgggaatatagatactttacttttcttcatttggctttcagttatattctaaattttgcaaaaatggacatatattatgtacctatcaaaaagttaaaaataacaaatattggcagttcaacagaccatgagcatttgaggagtagggaatctgcctgtcttgttcactgacatttttctagatattttctcagaaaatagcagaaagtaagaactcaacaaatacttgttgcataatgagtgagttgatcttcatgtgtttattgatagaatgaactgcgttaggtaatgtgaagattatatacaaagcacaaaagaaggcctgtgtcctaaaggactttaaatctagtttgggaggcaaaatgaacaaatgtaaaacaattaggaaaccatgcaaggctgtgtatacaaatatacaagtatatgcatatgtttttagttcttagcaattcgaaaacaatacaagactgtatattcatgtatatgtatatatgtgtatgtacctacataggattatatatatatttgcaatttgcaaacattgcgagctcgtgtatgcatatatgcatgcatatatatgtgtgtgtatgtatgtgtatttctagctgaggagataaacagcaagaataaattcacaaagccttgtaagagaagagcagagcgttttcatagacgggatgtggaggtgagcttggtttactcaaagtaaaatacatattaatgggaacgtggcagtagtgggagtaagtttggatgtaaggtaggtacaaaattacggtgggtcatgagaacccagttggaaatgtttagagtctgtttagaaagtaggatgtcattgaagattttttagcagatcaacataatggaggtggtatttaagagtgataatgctgacagtcgtaagaggtgtaggcaagtaggaaatacggaaaatcagacagcaggcagtgctgcattccaaacccaatgtgatacaggtacagggaagggacaaggtgatagcagagggggtggcattcagggaacagattcaaagtaccttgaaggaaaattccatcagccctgataactctgagttcggatagagagagaggtggtaaggaatgctaactcaaagatattccaaagagaagcagaacctcgtggatatcgttcctggttaagtttctgctcacctttaggagctgaagtactttcctagactcgtgagtcattttacaaaggggccctctatctttccactgcctcagggacagaacatatttaacccaatccacaaatttacgtggtgtctgctttttttcacttgtctccttggaggaaatcctgcagccttccatggtaatgaattcctgcttctgactgtgcctgtggtcagacagacttttctatgaatggcaaacctcctggaattttaacaaaacaaatagacaagaaaaaaagaatgcatgtatatacaacctcaccttaatttaatcattggaagaataaattcttttttgttatgtgggaggactgaattaatttacaataatcacttttataagatttctgggatttccaatttgcaatcaataaatgtttgtcatttaaattaaatttacggcccacagccagatttttgccacacttggtaatgacacttacagagaacatagacttcaagtaagaaaataatagccatttaagtggagagataattggctgtaacataagaacattgaagaatgttgaaactcatggagacttatggagtattttaaaaatttatgttgtacttatctttgcatttgtagtctaccacaaaattccaaattctgggtataaatcagttagatgttcatcttggagagtcataaatcaggaagcaacaatctgacccagcctgtgtgctgctttattttcagcctctcctgtcggcttatcttgcagggagactaaatagtgttgttcgtttgtgtgtgtgtgtgttcatctacacacctcatttaagcactgtggttttagacttctcggcttgataacatctggcttatcttgggaacatctggtttatcaccctatttcttccctgccattatgctgaccactggaaaaatatggctcaggagttctgacccacagggctctgtctcttggtatcaacccctgctaataaatagcaactcacaggatgcaggttacgtgaccatctttcactggcactaactttcctgctggtggcttttgttaatggaaggtgtggctaggagagatgaaattggctgctttttttttttttttttatggacgttgattcggttcttagccatttgcagtttgcaaagtgagaatgtgtatgtttcattaggcacaaggatttcagaaagtgctattttgtattttgggataggagaaaccaatgatttcatgtcagatactctaggcactccagaaagtaaactgggacattttatgggcttattgtaggtttttccaacctcccggagtctcaactggctcatcaaagttactctgcctggatatctttggggccaaaatagtggagacccaaattcacaaggaggaaatcttggagcagaatcaggaaaaagtggctcattgcttcttagatttacttcaaagataatagtgtaggtgaaagtaatcacaaggttcagggtgctgcattggacaaactgtctatttgtatagcaaccatgtgtctgtgtggagaccttatacacttgctgtgtttatttgtccatgccccactatctctacgccaggtcctggaagcacagcccagcagatgactcacctctggatggaatcaacacacaaagcagataaaaagctgaacattaaagaccacattgttaaagcagagagccaaattgttcctccaccattccctatcccagacttcacatctaacaaggttaatttgtccctataattatgtgcctattctttgagtaatgaaaaattttattgtgggttttataaaatgaattgcctgtgatgtaaaacaatttcagtaagggccatttttttttcttcttcttaacctctcaggttccttttaactttttttttttttttttttttttttttgagatggagtctcgctctgtcgcccaggctggagtgcaatggcaagatctcagctcactgcaacctccccctcctgggttcacgccattctcctgcctcagcctccctagtagctgggactacaggcgactgctacaacgcccaactaattttttttttttttttttttttttttttgtatttttagtagagacggggtttccccgtgttagccaggatggtctcaatctcctgacctcgtgattcgcctgcctcggcctcccaaaatgctgggattacaggcgtgagccactgcacccggcctccttttaacttttaagactgtgcgctcagaggtacgtttgaaagcaaggcagcatcctatgctttactgtagctagaatgagagcagggaaaaggggagagagatccacaatgaaatacacactcttattcttggcaatggcagagttgtttgaagctaaatgacttcttatccattaagccatttgtcccaaagtgatgatagaagatacttttgtgccttttcttttccaaaatgatggagtgatttgcacagtttcagattctaaacactaatattttgtagacctgcccatctccattactactgcaagttattcattcaaggtttgcagccagatggattaatgaattaccagatcttgcataaaatgacttggcctgacttaaacaactacttttttttttctttctccttttctttttttgggggttagggtggggagcagtcttacaatgggtgttaatgggctgtagagggagtgagcccccattgagtttttttaaactagcttttttaaagcttcactgcactttttcattcttttctgaacttctgctcagaaaccgtcagttcaaggaggagcaatcaggctggtagggcagagaggaggaaggagactcagtagtcaaatccctggtggccgatgcccttccctgcgccaaatcagcatgatttatcagagccctctcttcagcacagagttgagagtgagttccagggtcctcctcacacaatatgcatagctggagctctgaactttgaaggaaagcctcagagctatttgcaaaatgctggtgcttagtgaatactaaattacatttaggaaatagtctactgctaccagttatacttcatttttattcttgacacagacacctaaatcagagaacagtaacatttcagagattatggaagcagtttgggtatgctccagcactataataggatcagaattttaaggccttttgtattattaccaatagtcacttagtttctactgcagtgtactttgtagggaattacagcttttactaaaaagattaaaatgctattatgcaaatgattgcagtatgttattatgtttacaaattaacatccatggctcaacacacaaattaactaactatgctatctgtgttattaaggatttaataaagtaactgttaataaaaatgggtagcttggaactttagtagaaagcaattgtgatttaacacgtggaacttgagcattgtgtttaatgttctaggtgatataatggtaaaataaagttgaaaaaagcacatagaaaaaccaaaactgtgtgaacagcagagctgcttgcctgagaggctgatgaacgtgaactaaatagcttcaagctacaatgtacagtgggcagcatagcaataaatctaagcaaagcacacaaaacatcttctattaataaatagttcattgaaatgataattaccctccattacgtgtttgatatgttccatacacacagagaatacttatattattctaaaatggatctcagagcaaattttgctgtggcgaatgggatttagctgaagaatatcgctgggtgataaaagagaagaaggctgggttcagactaagatggctttacaaacaggctgcaaattgctattccgggctgttcataagagatcataaaagcaaggagataagagccgccaaggtccctgagaaatgaatgtatgtgattatgttatctcgtaggttggatttactagacagaccgacaacaccttcactttagcccaacaggaaaagtagaaagagatacaggtttggataacaaactttgttagaataggaaattccaaaacactgtaattcaaatgtttcagaagagagccaggattccagtcactgacttctgtgctggatctcaaaaaaagagctagggatatgacctaatattaagcaaataaacaaaaaagaaacaaaagaattacaagaacatcctggagaactaattctatatttcaaatattttggactgatgtttcttaattctcaaataaagatgttgaggacttctaagtccacaaacaattatctttttaggtctccctattgagggatactaacttgaacttcttagtaggaatatctggatgtgcttaagaaatgtacaagcagggaagacaccgcaaagttggtcaaggtttgtacccttgcatacaatacaagcaatttattttgttccaaatagcacctctgtggttgcaaaactacttatgcaaatttttgatatctagctttagcaaggtgcctggttccttcatttcatcccacatttggataaattgtgttgttcttcactcttccaaatttgtccttgtggaagcgaacacttgtaaattggttgaagcttgctaagagaaagaaagggaggaggtagggaagaggaggaaaaaacttgaccaaaagcagttgctgtgacagcttatgatttgatggtttgtggtcttgtcctgttctcaagcacctgatcaagaaagtggtacaatcctgctatgcagacattctggaaatcttgccaacattcacctgacatgaccaaggtttaaagtccttgctgtaattttacaaagcgtagtgagagtgtgtgcctgtgtatgtgcatatacactctctcatatcctttttttttttttagggggaaaaaagtgatctttgccatagaagggtggtaaaataattagtccaatagacaaatgtcttggcccatgtttaaacagagctttaaggacacagtgttcccaagagtcacatatctaaatacaaaccagtgtcagctgccatgcagaccaaaatgtaatagcctgctttcacataggtcatcgtcaatccattttggtcgcagtcacactgcacatctgtttctgcgagctgcagcttcttaaggtggcatttggacttcatcagaacacaaacaaccaagctataaattgccacttctggagttactttgaataagtgtatactgtttcatatttataatggtgaagcttcataatattcacagtgaatatgtaacaccgatcagttcaacaagcatgaaattgtatgttgtcaacctgtcacataaatagagtcatattctggcttgcgataatgttgaactaacattttttcccccagaattgttgagaggttcacagaaaagtgaggaggtagcatttcctttgggtagataaccagtcaaggctattgtaaagttgatattactgttgatgggttccttttctcccctccctccaaagcactagcttttctcgggtgaatgctaattggctaatctggtgtgtttctgctgtcatctaacggtatcattttcagctagtacttggaggctctttttgggttgtgtatgtgtgagtagctttttttcccctttaaaacttctttttttttctttctattcttgtagtgcaaatcagtgctaattgtcatgaaattctctaactatactctggcaagctttcttgttgccttttcaccccagttaactcttaatgtattactagagcattaggaaataatgaaagctggacattttattcaaacttagttgagatagagaatcatctaaagagatgcagaaaaaaattattgaaccaaatttgcaccttactaaaaagataaaggatgaatgaaatgtgcttgccggtagctacggagaaactcagagaccagtttccacagtggctgatatttctgcaccagaggcatggtagaaactgatgcaagtctgttttcacttttgagaaattcttagatgtgttcaaccttcctcatctttcttccaatggcctgaagacaaaaaggcattgcaatctgtattacccgcttaagctgctaacttcaacaccttgagatagtacttcagtttctctaaagcactatgcaatattacaggggattattaccaacacttttcttttcatcccatatcacttgggatatggctggtcacatttttttctttattttttattttttattttttatttttgagacggagtctcgctctgtcgccccggctggagtgcagaggcacaatcttggctcactgcaagctctgcctcctgggttcatgccattcttctgcctcagcctcctgagtgagtagctgggactacaggtgcctgccaccatgactggctaattttttttttgtatttttagtagagacggggtttcaccgtgttagccaggatggtctctatctcctgacctcgtgatccgcccacctcggcctcccgaagtgcgggattacaggtgtgagccactgcacccggcccacattttcttagacaagaaccaattcactggctaaagctctcagtttccaacttttgcaacatcgtcacatttcttcttgcctgtggattttaaaagttcatctctcacttatttacttacccattcatcaaaatataattgtcatccattagcatgcttagtgtctggccattttagggggatacagtggttaaaagtaaacctagtctctggctccatgaaaattttggttagtgatgaagacaggccttttacaaataagataagctgtctgtttgaggaagtagagcagggaatttctccatctgtctgttacccagttatcactagcagataaattctgcccttctcctacttattgtctttagaaatgccttcaccttgaaatggaattctgctggagagcatttctcctagctagaggaatattctattccaaaccaagatctgtcccactgccccaacaaatgcagggcagtgggacagaatatttgaggttggaagacctgaaatttatgatgtcctacacacagtatattaaaataacagtttgctcattggaagtgctgggtggccagggagtgtggagggaaaacaagaggaagccaaccaagggaagagagcaagaccgtcagtggagagttctttaaccagtgtgcaagtctgacctgaccagagtgctgtgcccttggtggggcttctatggatgagaactgtttggtaccattttaggtctgttgacctttctatttgagaatggtatttcagtccagctggaaggactgacacgctttttgcctgtttgagacacttggtgtatgtggcttttctctctctctcttggatccatcatctctaagtgatagctccttgcttcatggggtaatgctattcaggggctatcctgcacccttgggagaggcatgtgcaggaagaatgctaccgatccctttcctcttccctctggaggtaccaggcattacatccctaccaagccttactcaattaggtctctttcagattcctataatactcgagcttaaatcctcttctccacagttctttctgagaaatttatttctgctttgaaacggctcttgtataggggaaaagtgcctctattatagcactgcccttggtttttccatgggctcttggcttaaggacattagcttccctgggtgccatctcatttgctcagatgtgaagttagagcttctgtattccagacatagttctcctgggtgtccagggatccttgccaacccagattctctccagatatgttcccatgtcagaatcctcttgtgtcttgccagcccatacttagcggggacaccctgctctctcctctgagctgcatatctcagcatgcatttttcatttaggcaatgctgtctgataggcaggttcacctcctattcccactggagaagagtctgggcaaatgcctgaaagtttgaacacagcaatgccatataggataagtgacttcttttccttgctggtccccaattccagggctctgcgtgcaacagatttgagagttacattaggtcacaatgccactgtctagctcctttaatcctatcaccggcaatcccagcaatgtagctgaggtggctgcccctgtcctgaaggactttgtgtcagtttctcctgggacaaatctagtctggaccactttgcaacatttgttcaaactgaaaattttgacaaagacattctgttcacaaagagccaacaaatgttctgtgtttcgatacatttggaggttacaaaatgttgcctggtcttggcagataactaagtctggggacccacatagtgcaagccatgccctgtttaatttgtctttcaatggcaaatgtgtttcttctgtgattcagcataagggatgataccctccaataggactgtgtgacctccctgctgcttttgtggtatagaaaagaaaaaaaaaaaaaaacacggataccacttttttcctttagttgctggtttatttttatttccagctacatcttttatagttgaaagagaagatgtatgttccatagatagtacgcatttttatggttatttttataattcatactggaaaacctaatttctgtagccattaaaaatttaggattattaattgtctgaaacataggtgagaagtacactgtttttaaaatgtctctgagaagccaaactagattcagaaaaattccctcagatggagcacattttattcccagatacacttcttcacccctcacttaacgcttgcttccttttgctttacttatgatttaaatgaatccggttgtctaatgttctattcaatatgtgatgttctatgagcacatatgacatttgaagaaatggtttagaaaattcatgaaatggtgacagtaaaaagataatggtgagcagtgacaactgaccaaaagagacaagactacaaactacagaaagttgacaaaccctgaaaatatgacagtctggggccttttagtttgagggaaaataatcctatatttctcaataggtccatacagtcattttgcaataccagacagtgctaccaaaatcaatcctcataatttttaaagtggggaaaatatgtaaatacgtgattcggaaatctttccataaaaaagttttaataaaaagtttggtgcttaagcaagttaagttctttgatttatctgcaccagtgcctatgtggattaaagcctgatcatgtgaggaaataggtgaggcatatatacaaacacaaacacgtagttttagatctaacagattttaatggagtttatatattatcctgtaagtgtttcctgtgtagactttgataataaagaagaaaatgctccatgaaataccgaacttcattttataatctgttagattacatcttcccttaaaaatacagctattgaaattttcttgaataaagagaccactggattctttttccttatcaatagtaaagctttttggctacagggacgttggtcaagacaaatatagctcagtagagttatcgttaagtaagcaatttcccacattactttagaatgaaatcgcctatacttttctccttcatggctttccgtatttatcctacccagtcctcaaataagccaccaccccagcaatgcacaactcacttgtaaatattcatctggagcatacgaaatcgtaatatcactacagagactaactgcccccccgcccaccccgccgtgccattttcctttggagactcttataaataaatgaacaaccttagagctttcaaaacagtcattaagatctgctacttgcctttggataaagaatttcagataatgtacaggactgggcttcctaaatctaatttctgtctaaaaacctagggaatgctgtagctgtatcttctctatccaaactctcttgactgattctggcacctttcacctgagaatgcacagctcaagattctctatacggacccagagccttggtcgggccacaacccttcattaatattcaaactttggcagtttcaaagaatgctgccctcctcgaccactgtgagcagtccagctcccctgctactttctctcatgcttatcctttgtacgaagacatctgtgtctttcctcatgtctctttcaggagtaattcttccccttgttcaattttttcctttctctttatggctgtcgtaatagcccctgatacagccaggcagccatgaccctgtccatcactcacctgcaagctattcttgaaccactggatggtccctgagtgactagattaatggtgccagtggtgagccttttcacctgacctttcatccagtgacatacaagctgattccaggctgtgtgcaaggctggctgccctgccatctctgcaccctccatgaaaccaagcagtggaaaggagagtatccatgcaaattaagtgcagaagcagggataaaataaggtgtgcagttgggagttatcagaaattaaatctgtcttcctttgagtgccattggaaatgagtcttaaggaatgagaactgaaaggaaactttccatagacaccatttccataaacggtattgtcacaatatgctattttaaagactggttgttttggtctgtgtttacattaagcctttaccaggcatgggataaactattaagtcccgaaatttaggaaagtatttgtggccgtctttggcacaaagtgaatttttgttgtcacatgtgcaaaagagcatctttttctttcgttaaggccttcgaattgtggttcagctttctaagtaatagctttttggctaaatctctcaaggtgcattataaactgcatgagggaaagagggacctcatcacctcctcagtccctagcacaaagctgtgcacattaaaactctctctagtttttgttaatggacagatttacaggggctctaccaaattcagaaagagagagagaatataacatgaccttcccagccattcagaccaatcatgctaaaaataagacatatccaagatctgagaacatgttctccaagagatggtttataaacagagccaatagtgacagcagtatgctgtgtgtctgccagagtgtctgtgaacttaccccctaactcagctacaagacttgctgttcagatgaagatatatggagttgggagacatgtggttgtgttaagcgaatgtgcattggcgggtaaaggcgctgctatatgtctactgaagacatagagcatttactcttctctccccgagaagaggaaagggctctgccactcaatgaagagctcaggaacaggtaccttaccggggttccagagcatgaaagtaagtgtgtctctgttcaaggaacccgctgttcccaggaagctcatgcaaatgcatggccacagcttcccaacacgctgttcccagcactgtgcccgtatttcctggctggttttgaccctctcaatggattcagacttaaaatttttgcaactgtttttgtcgttgttgttgttgtagtttcctcgtttacgattgtaatgaaaacagtttacctcttgtggaaaagtgtgcatgattgtacaagtttactgtgccatacttgtatcgcagttgccttatttttggaagaatcaagcttaggggctagaaagaaatcctgggctggggaatgatgggtaatttctcaaggcattcagatctttcagaagttgtgaatgattctgaccttactttcatttatagtctgtgatcattggaaccaggatgcaaaaatagcagagagaggatctccttcaccttaattccctgcccttttctggtatctgtagtacaattgactatatggacatcactgctattttagcaaaagctggtgagttatcttttttagacgggacagtctacccagtccaggattttagtctgactgtcatgttataattcagtatgttcctatgcaggatgctctaatgcagagactgatttcattcattcttaaactgacccatttatcaactattttaaaaagcaacaactacatgctaggcactaatttaagtgcgcataatacaaagatgtattaagtacataatgcctacgacacagaattttcccttcaggagttggttggctagtgagaaagacagacttcggcaactaattataaaataaggggatgcattctgtattaaagtcagaaatgaagtaccatgaagacacacatagaggagtaaaaatgtccgtgaaaagggtgagaagagaggaaatttgataattgttgctagatttttttactcgtgagtcttcaataagtcagaagttaaataccctcttatttatttataaaatttagcaaactgcacttcccacctcttaggaggaagacaagaaaaaggatacacatagtaggttcttaataacatttgaaaataaatttgccttctaacaagtcccgtctacattgcactccgcagttcaatggctcattaggttttaacaaaagcagcgcagcaaaataagaaggattcttgagtcaagcacccccgggcggtatctctgagagcaaatgtgacaaatagaatcagaaatgaattaaatagtcagctacagcaagccaagctaaaaaaaaaagctctgaaatgacccaaaatggaaacgtattacagttatctgcattcacagtaccgaacaagtttggtcgtatttaagataattctctagtgcctgctatttttagctcaagggtaagctcctgtaagagtctttcggcattgcatccctttaacctggcctaacaaactaagccaataagctgtctgattttcctggtccatcagggaggaagagagatagctaaaacaaaccatttgcggggaaaatgttcggcctatcttgtgttaagagcttttttcatatagatttttaaaacatcccaatattaagtgttgcctgtcagagaccaaaatgtcaagctttgctgttttgaaattggaggctcatggttataaaaagaggattttataggcctagtctaatggaaataaacattactccattaccttcagtaaaaccaaatctttacagttcaagctatcattattaatgtctatgagaagaaagaaatgtttctagggctttatttattttttttaggtaaagaaaggcgagctgtaccatagcaaatgaaagttttcttaaagctttctcctcagtgactttgcagtgtgtaatttaaaagcagaaagcaaagaaaatgcagttttaaaacactaggctggctattcctggtatctttctttcttacatattcacaactctttgtgagcctattgctctgtcaattcttgtctgtctgtctctatatagtgtatacaaacaacttcatcaactattattcaccaccttctaagtgcacatgtacatgtgtgcgtgtgtgtgtgtgtgtgtaggaataaatgtgggctgtctcagtttaagccatataactgcatgtgtagattacaacacttaacaatatactagtttccactcatttcatcagaaaccatgctgctgatcatcaaagtttaagactgttctcaggttgaccagtttacctacattctgaagcctgcatttgccaatttagtgtgaaatagatttcagccgcagatgctacctgtgaggcaattaatcgccagatatttcttgagttcatattattatgtgcaaggtgttatgccaggtgcggtaagaggtggaaaggtgtctaacacaaggcctcagtcctcaaggagacttgtcactgaactgcagaaatgagatacccatgttgatagaatgccacccaaggaaattttaagacatttatagagtccctactgtgtcccagacaccatgcatgggtcttctctcttaatagatctgattctacctgaattaccagccttctcataaacattttattggggccgtgctaagtgtcaatcactacccttggttatgtgtgatttctgtcttcccacagatgaggaacttaggacttagtatttaaccagaactcagatttcctggttcttactgcttctcctcagtgtcagagaagaaatgggtattttctatcaggaatcctcagaaacgctggccagtcacattgccatgttcaaggatatatttgcttgactgaggtggtccattgatggttgaaggatcaagctgtgactctttcttttcttttggaggcagtctcactctgttgcccacactggagtgcagtggtatgatcttggttcactacaacctccacctcccaggttcaagtgattctcctgcctcagcctcccgagtagctgggattacaggcgagcactaccatgcccagcaaattttttgtgtttttagtggagatggggtctcaccatgttgcccaggctggtctcaaactcctgagctcaggcaattcacccaccttggcctcccaaagtgctagggttacaggcgtgagcaaccgtgcctggccagtggtgcctcttttttgcagagaactgctggttgcaattgcaactgccgtctgctgtcaatgaggtctttggtgctttgcaagcttgctgctgatctttagtcccctttaagacgggctgttaatctttagcacaaggctgactctgcaatacagcacacaccaggttgcctaacttcttgtttatgtgctcccagggatcagaaaccagtttgctgtttccccctaaaaccacaagccttggggtcattgtctctatctgtcctttgttctccatgtacagtctgctgcgaaagactttcctcttgttcttgagtgcatgttcaccatcttcctccatcatttcctttgaaccctcagtaactcatacttaggtgatttagccttcctctcccctgccagggctggttgctgctactcctgaaggtatactaccccacacataccatacttgattgttaaaccaaacattatttttcagcatctgctgtgtacctagaattttgccggaaaccatgataattacagaccaagtatatgggcttgggattcccttcctttggggatgcccagctgtataaggaggcaagacttacccgggtgacacaatcagacaatgggtaaaatgtagatagtaaaatgtggacaaagccctgttctaggcaccatataaataaaagagacaatgaattagcccctgccttcagtgtccttaaaaactaaggaaacatgtgagcattggcctgatattaacaaactactctaagaattttagaggtgggaagagatctgtgaaacctatgagtgaagagggaagctaatgtggtggaggttgcctttgaaatagatcttcaaggctgggtccagtgactcacacctgtaatcccagcactttgggaggctgaggcaggtggatcacctgaggtcaagagttcgagaccagtctggccaacctagagaaaccctgtctgcactaaaaatacaaaaattagccaggcgtgatggcacgcgcccataatcccagctactgggaaagctgaggcaggagaatcacttgaacctgggaggcagaggttgcagtgagctgagattgcgccactgcactccagcctgggtgacagagctaaactctgtctcaaaaaacaacaacaaaaaagatacagatcttcaaggtgtagagagatttccatggacggagaggaaacgtgggcattttagacgtcggctttcatctcattattattttaacacatatttatcacctactatgtgcacggatttatgctagatgttggaataaaaaactgaacaggatagagacaatgctatgagcaacacagtagtggtgaggaaagaccaagtgatgactggggactcatctaatagagcagcagagaaagtagatacaagtgaatgggatcttggaattgtactaaattaacatgaggggagatttcatctagcatgctcatttcacaatggagaaactgaggcccaggcatgtgaagtgacttgcataaagaatatcaaggttaagtcaggaggagcagaaaaaaagacaatatggggtttgttagacaccagggactcttaaaagttatctggtggcatcagcgaagaaaggttatcttagagcttgcaaccaggggcctggtgaggaagctgttgaggttttcaggcttgaggtcatagagcttgaattagggggtgatggtgacaatgaaaggaaggaatgcatatggcagacttcccgaaggaaggatcaataaagattgttgtcatattaagtgataggttggatgttgtggtgaaaaaagggaggaaaaatggctgtggtttcaaccttgggtgatttggagaatttgggcttggttaacaaaaatgagagaatgagaagaggacatgtttcagggaaggcgcagagaggaatgtgatgcgcagattgtaaagcaggtggggcggctgctattggaaggaagtccatgaacaatatgcgacgatggagctctggagaagtcatggagtgcttgataaggaggggtgtcttcaagaacattgtttatttggcaaataaactggaggaaagatttaagggatccccttttgccccacatagtaaagatttttctcttgctttgagtttgataattcgccaggcttcttcttgccaataataataatactacagtagctttgggcttgcccagcactggactcaacatcttaagacaatgttaaaaacatagttttacagagtttaattaaaaaaataaaaactagtcttatctaattctcataatcaccatgatgggttgaaagtgttacctcattttacagtttggaaagtgaggcttaaataagtaacttgcccagggccaagttacagaaagtaaccagaagaactaatattacctaactccaacagtcaaattcgtaatcattcccttacactgcttcccaattaatacctctattgccaggcactacgcttctcatcccctcctactcccagcttctttcaaattttccaaatgcctggaattatttctgtcttcttgtttgcaattttctcaaattttaaaatcacaggaacctctcaaattcaggaagtgttccctgattaattccacctctacctaaacatctagcagagacttgacctgactttgtccaagtagattttgtattatttagtggagagatcagcatgaatctgttcagccacagactggtcaacagatcagttcatgccctactgaccacagagctgtagacacttccatttgcagaggcttgtacttaaaagcatatattagaattgtgaaactgggcactgtttgtgacattcttcatcctcactgtgtatgtggttgatactcgttgactgattgactaagatttttgctggcatttggttgagaaggaaggcaattaccaagtattgataatgcatcttaaacctagctttaaagtcttttattgaactcttgggcatgtcttcatactaaattcagtagaatatgcctgttagataagtctcctgagagacaactttagtgaggaatataactctttttaaaatgcaatggaatatatgtatatttccccaaataaacaatttcttacaaattgcacgtagctgtgatcattccccttcctttagtgggcagcaaatcatgttgcatttgtgttatgcattttttcagaaatattttgccttttttttgtttctggaccaaggagtcaaaccatgccccattcatctttttcttatatacaattccttgcacataataggagctcagtaaatatgtaacactgcatggtattctctcacctacattataagcagggataatggcttttatttcttttggttcctgtgttctcctagcaactccctggtttctagttcaacattatgtccataaaaggtactcagtagctggtgaatgaaggaatgaatgaatgacatttaacttgtgatcatctaaaccattactaaaccaaattggaaatatttttaggggactgggaaaattacctgggtaacatgagctgttgagcagcttctgggctgggtctggtgactgtatcaaaatcttcagatacgtcagtaattccacttcagcatgttcattctttgtttcgaataatacaggtttttgtgcattgatgtttaagataaagtggtgcctattttgcatttctagttatgtttacaaaacagtgttttattgctgtctaaacatgagagtgctctcaaccactcccactgcagcacattgagaaagggctgttaggagtctttgcccttagtttgaaatatgttgtacttagaggtcgtagtgttctggtttgggtagcaaattattgatcagggtattatggtaacagctgtactgctgattggatgaagataaatatccaagcatgcaactggtattacctgacattattgtttttcctgggagcctagtcatcccaagggggttttataagaatggtcagaaggtaaatattaccaagagtctagtaggcagagtgcaagccagtggtacccaattctctccattcaccactatttgaattctggcccttgtgttttcctgcattcatcttttgactctttatttagatttccttgactttttagaatttttcttttgttccttgcttctttggcttcttgctgaggtatttattttttgaaggattatcaggaaacaatagcattgcttgtaatctctctgccattgagtttagtggtgcttcctctgctgttatcagagacttattttaaatagcattatttgttactgtatatatttaagatatagaacattatgttttgatttacaaacacatagtgatgattaccgtagccaagcaaatgaacacatccatcacctcacatagttacttttttttgtagtaagagcacctaaaatctactctcagaatccagtacaatattactaaccatagtcctcatgtggtacattagatctctagacatatccatcccacataattgcaatttgtacactttgacctttatctttccataccttcccctccccccacccctggtaaccatcattctactcgtttattttttgtttttaaggtagggtgtctcttgctctgttgcctgggctgggtgcagtgatgtgatcattgcttactgcagcctcaaactcctgggctcaagcagtcctcccatctcagccttccatatagctaggactacaggtgcgtgccaccacacttggctaatttttaaattttttgtaaagacaaggtcttactatgttggccaggctgctgttgaactcctggcctcaatcaatcctcccatgtagagttcccaaagcactgagattgtagggttgagctactatgccccaccttctactcaaagatttcttaattgtctaactcaaaagccctttttcaggtccccattcttcttgaattttctgtgctacttgaatattccttattgaccaggctacatgaaaattctttctcttttttggtgttattttattttattttattttattttattttattttattttattttattttattttattttattttattttattttgagacggtgtcttgcactctctcccaggctggagtgcagtggtgccatctcggctcactgcaagctccacctcccaggttcctgccattgtcttgcctcagcctcccgagtagctgggattacaggcgcccgccaccacgctgggctaattttttgtatttttactagaaacgaggtttcactgtgttagccaggatggtctcgatctcctgaccttgtgatccacccacctcgacctcccaaagtactgggattacaggcgtgagccaccgtggtgttacattttaaatattttgaatttttgttaatgttcttctttgcagtctcccaatttccttccctcttctttgaatacatcttctctccttcctttgctggaagaccctaaatgtacctgtaccttccccttacactttcagcattcaggccaactagagataattggacaagccaaagatcatgtctgacatggctcgctagtggctctgtgtctgaatgggttggcatcatctttaagaatcttgtcttggcctaacttgggactgacattttaagcattaaaactcttcactaattaacagaggcaacctaaagaatagtttttgaaatgatgcttgagtgttctcttactacattccctgggaatattccctggaaagcccacagagttgataatgtatttgaatcatgtactggaatgggctagtattaaaagttattacaatactattttaatttatatttataaacttatttatttgtattatataaatttatatttacatactttaatttatgtttatatttaatttattctacaaaatataaatataaatttacactttaaatctatataatttatatttatataagtatatatttatataccttaatttgtatttatatttcaactcagccagtccataaaacttgtagttatttttcctgtctttctaaaaaggctaaaaggcaaatgttctgcagtatggaactgagtctccgagttaagaggtttgccaggtaattgctagcaatgacaaaggtgagatttgactgtcaattttctacctttctgaacattagacagacttccaatattcacatatcatctctatgtggcattttccaggactttcttaggtcttcaaaaaccaaatgagggacatatctctacttcacaatgaggaaaccaggacttaaaggggcttgcccaaattccctgaggtcagcaaccttctcttctctttgtatcccaagaacctaaaggcaatggtagcaagatggttaggagactgggccctgtagtcagacatgcctgcctttcaaatcttagctctaccactgacttgcagtaggaccatgattatcttttttctccttttgtaaaatagtgcctgcctcagggttatttattcattcagcaaacatttactgatcacctatcatgtgtgaaaatgttctaggaatatagtagtgaaccagggagtaaaaaaaatcctgccctcctggagcttatgttctagttggttgttgttaaaattaaatgagacaatgcattgaaaatgtcctgtatagtgcctggaatagagggggtatgcattttgacagaattaagacaaagtctacaaactcctggaagtaatagcttttgcctttccttgaatctataaagatagcaaatgtaatattaataagtcctttacttttccaagaaccatttcattccacggaaagccatagtagtatttagccatagtagttgtttttataatttagccatagtagttgtttttataatttagagttctttggttgcaaacaatggaatagaaaacaaagaatcaactctagcttcctcaagcagaaaggcagaaggatatgtatggctgatggaattgatgagagggtgttgaactaggcttagtacctaaaagacctggagcctgggaactaaactgcaagaggagtctcatcacgattcaaatgtcaataggttttccctattctgtgctagccctggagtggtgagaatagtgtgaggcttttgcttactggctctcggtgtgtatccagtcaaggagggataattctgtgaaaggaaagtgtggtgcatttacaaatctactgggcagtcaagaaacaaccagtgacagttctgaggtcttaaagctggatgagttatactgtcagcacaaagtgtttgacattaagtaaaagaatggggttcttgttcccaactaaacagtgggaattctaccacccagtggctatcctctgaaattccatgaattgaaactagtgcttatgatttagttaatatacatttatctgtatgcatatgcagataaatgtatatttatctatttagtacataaaatctatttagtacgtgcgtgtgtgtgtgtgtcacacacacacacgcacatactaaatagattttatgaaacttcatccctggctttatttgccaaaggcgagtcctccatcttgtggtttctgcatctctttggcatttgtcactatgcacttgttgccttttatattgtcacaggaatcccagaaacacctatagaacatcagtgatgagcatcttctgtgagtccagtggtgcactggctctgggaatatggagagacctgttacattaccttctataattacatgtatttgctattcctgagaaatcatttgtgtgtctctgccaggaaacattagcctttccattttttaagttttcaaataatatatgtagaaataatataaggaaagtacatagttcaatgcttgcacttaattgatagtcaataaatggcaatttgttgacattccaataccttgaacttcctggatagctctgtaaaacggaaagtgtccttgggaacaaaactgcacaagcatgctggtcaagattcaaattccagggagaaggtgttcaacagcctgcccctgggctctgtgccagcctctcggtgatgaagggagagtccggcttctgttattggctccccagtatgtattcaatgtgtacctttaatcaaaggtaaattccatgagggaggggccatgcctgttttataggccactgtatcttgcatgtagcagtttctagcacatgatatgcacccaagaaacatttgttggagaaatgaccaaattgggattctctctacagaggctaaagggaaatgactaagctacttgctgagtggctatcattagtgcataattttcaaaagcaatcatagaatgggcaagacgtttaatctctgtcatgaaatgtaacctttagagggaagacaagcaatcacaatgtgacttctccgagtgtcctgcagctttgagcatggcccgggcctctctctgatggggctgatgaaagccaacgaacaaaggcattttgtatgttaaaacaaaccacatttagtcaacagtgtttgcaatgactaatccctggtaagaaaacaccaagaagtggcctacacctcaaaaaatataagcacagagaattctttcttggaatactggctgcaaaagttcagcgtttggcatttgcaatgattgctgtttgattttctttatggttgtgttggcacattctggaaagtcaggaagctcaagtatatactgtgggagctctatggggtgggaataggagatatacaagctttgttttgtattataactattgcaacacatttccaaatgtcactttttgtccatggtgggagaacctggggatagttcaatgtcagatggtttcaagtgacataacactagtgcagtaatttatttattcaattattgtttattaagtgtctactatatgttgagtctggtgacactttggtttttctgtgtttaaattttattgtttcattctgatgtagcacatcccttcctgcatctctttgccagcctaattccttataacaatccagacttcccctcctacatcacttctcccaaaccaccaacacctggcaccctaccacagcttaggtgcctctgatgtgggccctgtagaagctttacattctcccaggatttctcaatctgcctgtttcttatttgtcctgtctctcccatgggatgagaagctatttaagggtctgggctgtggttgtcactaacccagtatcattacttaactcagtgtctgaaatatagtcggtgcttattaagcatatattaaatgcatgcagaatatggaattaaataaacctgaaattattttttggagtacattatacaatgcacaagagtaggcatttttagaagcatcgagcatagtaggtccttgcttgtcccaagagagcgttcagttagctaagtaatcctcatatatttgacaaatgctttctgaatgccaattatgttccagtttaccatctatttggaagtaaagataagtattttaaaatataactaacattaaaagtcttgagtggtaaaagccagattcaaataagacagtgaagggtcaggggttgcatgggtatattagtccagtctcactctgctgctaaagacatacctgagactgggtgatttacaaagaaaaagaggtttaatggactcacagctccatatggctggggaggcctcacaattgtggcaggaggtgaaaggcacatcctacatggcagcagacaagatagaaaatgagagccaagtgaaaggggtttccccttataaaaccatcgatctcatgagacttactcactaccatgagaacagtatcggggagtgcgcccccacgattcagttatgtcccactgggttcctcctacacacgtgggaattataggagctacaattcaagatgagatttggatggagacacagccaaatcatatcagtgggtgaggatatcacttaggctggtaaagtatttcaacctagtttatattggaaacaggcctttctttcccttccttcccctttttttctttatagcttctcattcatccatctgggatttacccggtgtctaccatattccaagcatcgtattagatacttggaatataaaaatgaatgacacactccaacctcaggaaatacacagcagtaaaaaaaaattttaaaggtgaatcttgcctttgaaccaaacagtttagtacagtgtttattttcagtataaaaactcatatttgtgggacaaggccatcttcatttatatagttcttattccttctctcaaattatgtttcttggccaagtctgtggaactgttggactgtatggcctctcagtcaagccagacacagctgagaggccatcggaaacttgtaggaatttccggtaattggataggaccataatcaaattttatatgaagtctggatgtgctgatgatgtgccttcatttcccaggtcagagggaaaatctggatgccttaatacacccaaaggttaggagaggccttttctgaaattgttttcaaagggatttccatgaccaaaataacataactatgctaaaaattctgtgacctgataagaaatcccttgcctggattcctggcaacattacttaaaactaaaaatgattctctcttctcagaactaacactcagtatcggactgacttatctgacacttgtcatgtacacatggccttgtgtcattagttgtattttcactgctcctgtctcactcccttgactagattataaactctttgaggctaataaaaataatacagacaatagctaatatttattgagggtttctatgtgccaggcagtattctaagcactttatacgtttcatttaatttttacaacaacctgtgaggcaggtattttatcattatcttccctgtgtatggggaactggtcccagacaagttcagtagcttgccctaggtccccaatcctagtaattgacagagctaggattcatgcccaggcagtctgactgtagaacctgtacccttgtttactttattgtttgtcttctctagatgtcttgtgctttactacatgctgacttgcatgtggaagatactccagaaattaaatcgttgttttatcagatagttttctaaatgtctcataatcctatcaagtttctgtctatccttctgggtaggagatataaggcagttgttattgtcttaatattcttggtgagagtataaaggataagggtttatttcaggtacagcaaagaattttctacagaaatccctcctcattatcaccactgaaaattcacagtgcctaagtgcttatcaggttcaaatatgatggaaacctgtcccatctccaaatttgagattcctcttgtacacatctaggacatttgagtacctcctcaaaatgtgtctcattgatctgaggtaacatagcagatgtaacttaggaagtctttattttcatttctttaacaagtaatagtcctttggaccattgtaatagaacacataaagtataatgaccctaagttaatgttgttttatgctttattttctgtaccatgtttctatcttacatgtctctcacttttccccctttaaaagatgttctagggagtgcctgccactaaaaactaacccctttctgtactttcctttaatcgaactatgaaattttgtgtatttaaaaattttgattgtattttgctttctataatgaaaaccttcttctaatatagaaaaccagtatcctaaatgctaaatgcttaattaaaaaaattcttttacaaatttcttatataaaaaggaaaacctgtgaaaggaaatctctcagctccagaatcaaattaacaaataattttgattggaattatttcatgcagaccatcctgttaacctgcaaaagacaaagtgcattatagtttttttttagggcagtgatgatgtagctggaagttgaaataattggtgtacaaatacatgtgcaaacacgcacacatgcatatgcctgtctgggtcatgtgtcttgtacatatctatttccctaaaggctgataaaaatgtgctcacgaaaagataaaaactaggctttatatggtaagtataaaacatggcatgatgctgtataatactttaaaagagttatgttggtgtgcttaaccaatatttcatgggagaagagaactcgaataggatcttaagctttaggatttctatgaagaaaaaaaaacggagaaaactattttatagtgaagataccaaaatgtggaggtagaaaaatgggggagggtggatttttaaaacgacaatcagaggagagtgactccagtgctcatgggaggtaggcaggaaagagaatgagtgatgtggccttgatggggagcaagtacaatgaagactgccatgaaaattctatgtcagggctgtaggggtggagacagtggaaatctgaggagagcagcctctctgtaaagtgatcagctcctcctcaaatcccagcttctctagatcttcagatttattttttaaaagcagaaatttcagatacaatttgcggttcaataactgttgttaagtaatctaataatgtttaaaaaccttttgtaggcaaaaccatgctcaccaaatgaaacgtatgtctggactggttcctcctgaagacctctagtttgaaacttgagctagaaagaatgaaataattctacattttaattcaaaatgttgtggtctgcctccttagtggggattaattgtaatggaacagaatatttatgccctgcatgatggggacaagtagaaaaatgtgctgaattgatggagaaaactagaacctggcttctgaaactcttggttgtggaccagcttgagcattacctggacgcttgttagagattcagaattttaagctataccctaaacttcctgaattagcatctgcatcttaacaacatcttcaggtgattcatatgcacattaatgttaaagaagcactggatgtagtatacttaatgttcttgttttaaaatagcttctgtaagacacagcatacagcaaaagtttgaagagagagcaaaatctcagagaatctttggtgtaactagtgaaacatgagacaataaaaaggttcactcttactgaagcttgaacagagcagttaatatggtaatgttgatatatttagtaatgcgttcacagtgttaagttttttgcaagaactggtgtgccaagcacaagactcaacacaggttatgcacatatttggtaatcagtaaattaccttagatagtaagtcagttgttgaatcctggacaactgataacatcatttgctttcacgtgttttttcaatattgtgctcagcctcaaatataaattgaatagagtgaccctttgatactctatgaaatcgactgcatttcctaagattctgtggtttcaattaccataaatttttgatattgggtccatagccattgcattgtcccagcataacaatatcttatcatcttatcattggttctgataatacagtctgcatcagcacaacatattgttactaatattgtatgtgtgtgagcatgtgtgtgtgtatgttcccagtcagaacatcatgtcaagtgcaggagcaatctgcagtttacctagattaaatcgaatcactatgtgtattgcaaaatgagaattatttttgttccagtgatgaaattgtgttctaggttgctagctggatcttgagtttgtgagatggataagtccattagtggttcctcactttattagcaacttaattgtcagaatgtaatgaaacttctgaactgcagcaactcattagaagcaatgaaacacatgacattttttctagaatattcagtgagctactttttcccccaaagagatcttgaaaataaaattaacaattaagtttaaatgtatacctataaaggtaaaacagttttgaattctgccctgaaaaatgttctggataagttagggtcactgaaaagaggggaaccagcatttgaattcctactcagacacatgtttaagtaacctttaatgagttacttagcttctttaaacctcagttttctcatacgtaaaaaggtgatttaatagttatttcaaactatcactatgaagataaaaggaagcggcgtgtggaaagggcttgacagtatccctagtgcacagcaagagcgtatcaatgaccgctattgtcactctttaattttcaacctagatattttaattctcctgcctttgccttgaaataagtttgattttatttcttcaaggccaaagatgtaatcattaaagatcatgtatcccactgtattttctactagaaacaaggctagaaagaaggctgtactttactgccatgcttgtactttatagaaattgttggtgtctaccaaagcaggagtttacttttagttccctggtagatcgtggttgttttcacttggcctttatgacaatattactctgagcactgtcacagaagctcaaagaaaattcttgcttctcttcttatgctttattttagcgacagctcccaaagatgatcttggcaatgtataagaagcagtacaagcattgcaagtggtgattaaacctttaacttatatttcaaagatagcattaggttggtgcaaatctaattgcagtttttgccattgaaagtgatgaccaaaaccacaattacttttgcaccaacctaattatttcctgaagcccgtagctcaaacaaacagtgtgatatgaaaagagtatttcatttccatcaaaaagcgaaaataaaattatggataattccattctccttctaactccctgttctgattttttcttttctttctcttcttattttcatttttgtctatttttttccttcattcaacatttaaataattatacgacattacagactaatgactgtaccgtgcagcgaggattctgtaaacatcatgaggacaggagcagtgtctgttagggccactgctgtgtcctcacatgcatgaaacacctgccctccaaaaaaaaaaaaaaattctaaatctacaaataaatacaagaaggaataaatgagtaaagccaaatgaaacaagactatgaccttcaaagagcttaaatatgtattatggccccttttctttttaaaaatattatccagaattaaagtaaaatgcttgctatatttactaaaggttctattctctctagtcttatttttatgtaagataaatccattttttcttcccttatcatcttcaaacacaataaacttttctttttcatctgtatcccctgtttatatttgctatgattcagtggtttttgattttttaaatgacagttttgtcctagttcagctattccaaattgaaggcaatatctgtgagcctttttatcagctatgcgatagtcaatttattatgtaagtagaaaggccatgtattcagggctaaagattgtgatatggctcatcttaggtaacagattaagttcacatggcatacggtttcctagcgttccttcttaagttatgttcttttattgccagcataacattttgaaaacaattttaaataacgaacatcattagaggaatagtaggaaatttttatctgatgtattacggtgctctttatgctcagtgtctcatttaatcctcaccacaattctatgaagcagatgtctccatttttttctttgagacggagtctcactctgtcgcccaggctggagtgcagtggggcaatctcggctcactgcaagctctgcctcccgggttcatgccattctcctgcctcagcctcccgagtagctgggagtacaggcgcccgctaccacgcccggctaaattttttgtattttcagtagagatggggtttcaccgtgttagccaggatggtcttgatctcctgacctcgtgatctgcccgcctcggcctcccaaagtgctgggattacagatgtctccatttttacgttgatagtactgggattccagggcccagatgccttcctcaaggacacaggcctgtatatgacagaattgtaacttgaaaccctttttttctaaggctaaatcccataagactttgagtctactactttggaaatattcacaatgggcataatattgataggaacagcagcaaaaaatgagaggtcctgagttaatgtttcaagaatattgaatgctcttccggggacaaattgagcagcaattgacgctgaaatggcactgaattattttgctatcaattgctaaagccttatgttttcatatcgtgtgcagatctattccagggccacctctagctgatagcatcagatctttcacccctgaagagattacagctggctaacattatcctcacaaacagacctggaaagtttgtctacaaccactgatgggagctcaggcaaagaggactctgggagagggttagctcgagggcatcatgatttctcttctgcttctgtggctttgctctagagtctcagaccaatgctgtcattgtttttatgccggttgttatagtctacttgctactgtgaggtgctgtgaggaagaaataaatttaagtcaagtttgtaactatataagcatggtacgaattcagtaaatattgcttgaatgattttatctgagaggcatgaatatttagcactacatttttatataatgctgcttaactcttccttaaagcacataatgatcatgctattttttatgtcctgtaaccttatgggacaactatggcagatttcacttctgcctttttacagatcaaaaaattaaggcccagggaagacaatttgaaagcagggccacaaagttgtgtagacctgggctgactttgattaattatttaatcacactttagctatttctcttcccattttctcatgtatggcatacacaaacacactctggggttctttatttttatatatttttaagaataaaatgctcattacagaaaactggaaaaagacaaattgacttaaagtcatctgaaatctcaccttcttgtaatattttgggattcattcttttaggctttttccagtatccatgcatagatcatggactgaacaagtgctatttgacaactgtcttgattcgtttcataatatttaatggctatgtttcattttaacaaaggtatacctatataattgttttaatgggtatcaagcatttcacagtatgagttccctggttttctttttatctttaaacccaggtactcattgcttacacagcctatggtcagaggtaactctaatgtgatctgtgattctttgtttttaaaggtgttcaatctgatggcagtagtcattgtaataagacttttggctggcgggtgttgccatcatacactaaagagatttcatgacttaagacatttcatggactcacaagtactgaaacagggtatgagtggtaatggaggagagaactgtgactcaggaaagaagactccttcggtcaaggggccagacttggtatgcactggacaaagataaaacatcatgttctgtggcacatgtgagggattctgggcatctcagtatgccacagctggttctcactgatgggcaagccttctccttcagcctacacattagatcataacaaatattctcacctttcctcaaagtttttattatttaatcttttacaggtgtgattcttagtcctggcttctattagaatctcacctgggaagatgttaaaactactaactcccacctccaaagatactgacttaattgctcaagggtgtagggaaggggcaagcatatttttttaaatgcatatgtgattaaatttaaagccaacattgagagtcactactttacaagcatctattactctgtaagagtcagaagaaaacctttatcccagtatgaaaccttttctaagaaaaaatatttgtgccctgtttttgtaaataagcctgatttttaaatctattttggctttacataaatacaaatagagttcttattgctttttcctttcatttatttctcacagttgtttattttgtttatagtaatttattttgtctatcatctctcttcccccaacagaataagctccttgaaggcaggaatttttaattattttgttcatcgctatatccccagtgtcaagagtgtccgacacatgctaggtgctcaaaaaattcttgtcaaaatttttgacactaattttgatgcacagatcatgattcctagtcccaggaagcttgtgatctattaaaaacacacagacatgaaaatacaatccagtatttctatggaggttaatgaattgtaatatatttacagtaggttaaacaatgttgagttttaaagaaagcatatggcaaatgtaagagacagagtctttgccacttatttccttttattctcctgataagcaacatggtataatagaaaaactaaggagccaatagttccaaaacagatgtagaattagatcagttaccagaggacattgagaaagtttgtttaaccctttggatgtcaggcttctcatctccaacatcatactgttggaagagttgaccacgcagcttttactattcagtgtttccatgttactacatcctatcgttataggagccacaatgtggcaaggcattaaatggcatgtttttccttttcatcgttctgtaaatcttacatttttatccagatccatttacacctgtcttgtcattttccatgctgttacagggacacgtgcttttttatcctgttatcaaactcacttttaaaatccccctttgaggttattagctgctttgtctaacccaatgtcatatgcttctccactgtgcatgctctccagatatgcatataagtcactgataatcatgaatgagtctgcatttggaattgattcagtgtgaagtatttaaagattcttcacaaggggttcactcagtctggcattaaaagaagctcagtatctaaatcctaggagattgcaaacttgctcagatgctttggaaacctaaacccatgtaaaatacttagatataaagtcattgagaagatgaacttctcatattgtatttgttcggcaagcatttattgacaacccgttgctctgtgcagagcactttagtggaatacgaaagttagtcaaggagtcaaagacccaatcccaagctctaagtggctcctagtttcttggagaaaggagctggaaaggctcagaggattaacatggagcacacttggatctctttcaccctagatggcctcacagaaaggacaccctgcctctgaatagcttccaaccaccttgagacaattttctctcattctaatgccattgccaggatattacagtaatcagatcatttgacgttacctgcatcttagtgtccgcaatcttaatataccatatagatccaagtgtcaggaatctgcagctgcacagtttcacatattatcttgtggtgctaagtctttatgaacaaatagcattgacctctgtgatggtgccgtctaagcacttctttttgtcagcaaatatactatcttatagagaactcacaggttgtaataggaaattattcttccttacataatgtaaaaaacactggttatgcctagggttaatgtagtctgctaatttgtaacagcagagctttgtgaggtattcacagcaggcctccgtgctaaagtcctggtgctgctgttctgattgatcaatgttcttgtgcgatgtttgttaaatattttgcctatcacccccctcctgcttatacctatacgtaaaccatgaaaaagtaatttcttactcattgcaagttccccctcagggcctttggcccttactcttactcttttccctgtctagaacatttctttcttagctattatgctttgctgctccaaatgctacctctttttttctctttctgtatgtatgtgtgtgtgtgtgtatataatatatatcatatattataataatatatatcatatattataataatatatatcatatattataataatatatatcatatattattataatatatatcatatattattataatatatatcatatattatgatatatcatatattataataatatatatcatatattatgatagatcatatattatatgatatatattattataatatatgatatatatcatataatatgatatatattattatatattaatataatatattactatataatataattataattattatatattaacaatatacaatataattatgtgataatatataatatattatatgattatattatgtgattattatattattatattatatattatgattattataatatattaatatagaatatataataaatatattctatattatatataatatatataatatattatatattattatatgataaataatatagattgtcatattataatctataatatattatagattattatattataatatataatatagtttatgattattctaatataatatgttgtcatgtacacatggccttgtgtcattagttgtattttcactgctcctgtctcactcccttgactagattataaactctctgaggctaataaaaataatttttttgtatgtgtgtttatgttttatatatacacacatatgtatactgtattctcccgatgtataaatataaaatctattattatctgccatcctttcaccaccaaactaaaatgcaagttcctagaaaacaaattatagtacatagtaggcactcaataaatatgtgtaaataaagatatatatataatatttgtaaatacgcacataaatatgcatgtttatatgtatctgtaatatgtatgtgtaaaaatgtatatatgtatacttatgtatatgtatctgtaaatatgatattggtctgcatgtatgttcacaaatgaagggtgtgtcaggtatagatattttaattcagctgagtatggattaaaggtgatcattctgtgtaataactggcaagcagtcagtgatcatgtcaaaccatgcctgttaactctagcatctcaaccttaactagtaactgggagataatgaattttatacaaattgtaggaatttttgagtaatatgtatttagtaattttggtaccatccttacaatttctacattgtgtaggcttattgtacagtgttcttcctttttcactccatttgttcatgtcttatctcttcctcagatttgttttcaacaaatccatattttgtctcacttattttgaattcaatttagtgcatgaaaatgataatgttattgttattagcagtaaagataaatcctcactatataccaggcactgttctatatgatttgcatggattagctcagtcagttctgaaaacagccctgtactgtaggtcttattaaggttaagtaacttgcagaaggtcacacaccttgtaagtgatgtactcaggaccccaaatcaggaaatctaactttggagtctgtattttgcctcactgcctatttcaaataatatagcaatattatacggcctttaaaaaatcttaagttgagaaatgcttaagacctctgtgaaaatatatagaagaaaatccttaagaatcatttagcaggtagactatgtaataaaatagactccagaactgaaatgaactttatgataatggtgatagtcagaagttgttgaagaaagagaatgattggcaatataaagactgagctgccttaggactgccaaaaacaaattcgggaagtgaataaccaatatgctgtaatcaacagggaagggcagaccataaaacaactaggcacattaatgtaagatattgggaaaaatagttcacattgaataaataaaaatgtgttaataataactattaagatctagaatcacatgtgttagagagaataaatctagcatagatggaatcatacatttcaacttgatttacacactactcaacagccacaaaacagcaaattacccaaacttgcctgattatcagaatcgcctgggttgcttatcaaaattacagaatcctaggctctacctcccagggcagttgttctcaactgagggcaattttgcctcccagaaacatttggcatatctggagacattttggtagtcataactggaggtgtgctactggcatctagtgagtagaggccagggatgctgttaagcattctaaaacacacaggacagcccccaaaacaaaggattatctggcttaatatgtcaacagtgctgcagcccagaaactcatatctagagattttgattcagtggtctgtgatgaggctttgaaatctgcatttctgtctatggatccaagtttttctgataaaagattggaaacttggtgctatcaatagagttggacttgttgaaaaacatcccatggaagggaatgcttaaggtaggctttgagtagggatagaatagaaacaaaagatgtaaagagggaagaacattcaaatagaagagcaaatcacacccagtaggataaaaaaaggctgtgaaccaacactgggccagccagcaataaatagtgagaatcatttgcaaagcaacctcctctttctgcatggaaggccaactgtgcctcatggcatgtaacttgcatctcccaccttagattttagctgacaataaatgcatgctatgtcattctaactcacttcttagtccccaatatgaagataaaatagcccacgcccactcatttttctaataatatcttccataaaatcccaaaatataaagaaagggagtgagaatgatatttcatcagatatatctggtttaatatccaactctgtctttcattagccatgtgagtttggacataataatagggttaaatgggtggtttccattaaataatgcatgtagagaaattaactcaacatcaggaatatagaaaatagtaaagatcagctgctatttactattattattatttattaaagtaatatttatctaagagaactatggcattatttaaatgaacagaaaaagtacaagttgggatttaagatgatggcaggttcttatcatcaatcacagcaactgattattttgtgctttgttttgtttgaaggggattgagaaaatcctgcttcatagaaatgagtattttaaaatggctccaggtttgaaactattcaccctcagttctcaaggtttttaaaaatctgaatacaatacaaaacgattcaatttggctgcttaatttggtcatggtttccactgtgtttctgtatttatgataagaaagttaacacacgtgagtgtgttttctaaaaaaaaaaatgacttcttttggctatgaattaaggtatataaatacataaaatatacactataatatttataataaatccttataccagctattctagtgtccagagttctatgaaacatagtttaaaaacttctggataagattaatatatattcccagcttgaagatgagtgtgttatatggtatggaatgaagaaggtcaccactctagttcagatagattacatcaatggttttctcttgactagagagtcaatactcctgcatggtcagagagtaggtttgtctggcatgattatctcttcacgaaagcatcttgactctttcaagatgtttgcaaattgattgcttgatgatgtgtcccagtatccttccagacaacagatttgggtaaatttctgcgttttcaagacccatttaaacttcctcttttacaaaagatgatcattacatttacttctatagattcactgcctaggagttcatttcagaattaggccctctatagctgtagctgttcatattctttcttccccactaagaatatatcacttgcttgcctggcctgtcagctggtatatgtgaaatgaatgtgagataattttgaatcatagcctaagctaaacattattaagaagacaaattgtccgaggataggaggaggtgaggattacaaagaaaataacaacaacaacaacaaaagaagaatgaaaatccatatattcttatattatcaggatggattagactctttagttaccattctaactcattttagttaagcctctcctatatactaagtatctcaataataatcaaataggtctcacagacctccccttttagatagttcatgaagaagataaatcactaaaacatatgttgagtcagggagatgaatgccaaagggaaaaataagatagggaaaatgtgtagaatgtgtccagagtagttgggaaatgttgcactgagaaggtgacacttgagtaaatgaggggacaaaggggcaatccatgtggccctctggcagaagaaccttctaggaagagaaaacagcaagtgcaaaggcctgaggacaggagaatgcttggcatttttgtggagtagtgaggagatcagactgattgggaaggattcagataggtgaatgaggggttgccagagtcagatgaagttggccaagtgtagggccaccatacattccagttagcctggtgtagtctgggttcatccctgagtagctgattatgtgcactatccgctctccctctcaaaaaaggttctgcttggatgataaattatatggcgatccttggttagtaaggcactcttaagatttagcttttagtcttagagacatgagaagccacggagggtttggtcagaagaggggtttcacatgacttaggttgcatcaggatcacttcgtcttctgtgttgagaataaaatattgagatgggttggcaaatgggaagccagttaggaaccgatatggtttggctctgtgtccccacccaaatctcatcttgtagcttccataattcccatgtgttgtgggagggacctcgggggagatgactgaattatgagagcgggtctttcctgtgctgttgtcgtgatagtgaatgggtcgcacgagatctaatggttttaaaaacgggactttccctgcacaaacttctttttttttctgcctgacaccatccacgtaagatgtgacttgttcccctttccttccacggtgattgtaaggcctcccacccacgtggaactgtgagtctaactaaacatctttctcttgtaaattgcccagtctcaggtatgtctttatcagcagcgtgaaaacagactgatagcagaaacctatgggattttcattcgagactatgcaatgcagccagagagttgagttgtttcacttgaggacatgtagctagctggtggtggaaatggatctaggattaattctcctgacttccagtctggacttcttcccacagtgcccagtttctctttcagtttaaacttgagaacaaatagaatgccttgctcgctcttttcaggcctattaagtctccagtttgatggcacaactcagttccttcctcttcccattgtgagaaataggcatgacccccacaacctccccgaacctttttcccctttctcctgaaatagctcattttgcatatattaaccaggaatttttaggactttctgttgaacttctgtatttatacttctggctcttataacctctacagaatactgaatttcacgtgtacagtacatatttattaactcatgaatgtgtgatagaagcaaatcaataaggatggagtctaagtacagatgtgaatatatgttttatgcctgtttaaataggaatatgtgtattaattggaattaaatggattcccatgggtctaattatgtctgtgaattcttcaattttgtttatattttatttccacttgattcttattttatttttacaggaattagccctggtttttgatcgttgctttcctcagttagagtggctgagaggagcaatgtatgtacagattatacatttttttatagtcaactacaattgaatatcagagaatgcactcaaggcattgagatatatatgtgcattagattctgttttaaatatgtgtgcttgagatataaacttgtgggtgtgatatggacagacatatttacacacgtggtatttcaagtagcctgtatgcccatggggagttactcagacagtgaaattaaaatttatgttatttctaccggcccacaaattccagcaaatttggcatccaacagggcaaaatagattgtcatataatgtgcttatctctcatgggaataaaataagaataagctaactctcagggcatatgtaagaaatgagtggacaaaaagcattttataatgtgttacgaaatgtaaggtggtatttattgtcttgatttttttattgcacacatatgcttgagatttcttttctttttccccaccgtccagtgcccataccttattctcagccctgtatttcatatgacaaacaaaaagtaattgggttattttaaggactcctcctttgagtgaggtaggagctaggaacctctcagtcattacatgtgggagtccgcccacttttggttgggtgtgtgagaaaggggcacagatatactgtcagtgcccacacttgggtataaaagaagcaaaaacaaaacccacagtggattgcagagattttagaggagaaagataacgaagagggaaaaaaaatcaattgtttgaatgtgggtattcaaaatacttaacaacctataagcaaaggctcagagcactttaagtagacacatgcagtgaagtggtgtctgttctgattagaatgggttaaagaaaaaagctaaaaacctcaaatcctattccagtagtcaactctggattgttatttttaaattttattgcaggaaaaaaacttagttttctttaaattttgactttactttcttataaatattgaatcaaactttatgcatcagaaccaaaatctgtacatttctgcaaatattttttgctgatccatgcatgaaacaggtacaaggttttatctatggagattcaagaaagagacacacctctgacccactgtatttcttatttgaactcctgaatctattataaaagttgctttcccatgtagttatttgaagtcctggtggggcctagcggaaccaataatccaaagtagtggataatccaagaatgtcatttatatttggctttggaatacattaccagatgttactctagcagatttcctttcctaattaggcctcacttaaagtaggagttaattttgtcttcattagctgtttccaagtcagcaggatggggcaaggaggaagcctggggcatgctgggtatttggggggagttggcccagtgctaaacgtctgtggtagatcctgttcaaagaacaaaattcaaacacagataatcaagttgatgggaatatacactggaaatgtttatgaacaccttcttgaagaattctcaggcctttgtcaactcttttttttttttttctattaatcatgagtgcaaaaaaattccgtaataggaattaggcaaataatcacattaaattttgtacagaaaaaaaattagaggctcagagaggttaagtcacctctcacacagattgatctctaagtacacagtacctaagatactgaaactgattaatgaatgataagaagaccccactgtttccttcttattgatgatttgaataatgaggaagcgagaattcttctggcctaattcacattaagagagccaagataatgaagctgtgattaaatggctattaaactatttttatcaaacagagatcaagcgagtgtgagaatctggggacacagagtgtaattgcaatcctacaggatccagaaaaaattactaacataagcagggcatggtcctttcataatagctcgcatttagaagtctttgggataccgcatgcagtattcactctgcatttctcccttcaggtggcagttagcatctcagagtccctcctctcctccttaatttagtggatttattgaccctctgtgtgcagttgggtgagttgaatgcactgtctgccacaccatgtataaccagttggaagatccttttgccaactgtgcacaaaggaagaagacccaaatattacaaactgggttcagaattttaatgtagaggtgcccctggctacctgaagggccagaacctatcttctttcaactatgccttttaaatgatgtcagactagtacaggtcatagagggactcagctgtcccaaagagcagagataaaccttctcattttgttgactgttctaaactatcatttattaacgacacggtaacacttaggaattgttgcagattctaaattttgggttgttagtataaatgcatgtgtatcatctgtcactggaaattctttacaccatgagtgagtttttgttgatgtgccttctttcttcctagagcgcccttagagaataaggtgttacagtcacacagacctttatttaggtcggaagaattgcattgtgtaaggagaacccaaggttgacacccaccatgggaaatgctgtttgatagccacagagctcaactgtggaaatgcccgttggcctgttttctacctttccttccgcctctgctgccagctccaaggctgagcttagtttgtgcagctgtagatcactgtctaattggtgacctgctctttcttcctccctactctgcattttcttttcttttttccccaactcggatggagctaagacatatattttttgtaaaatagtattttcaaacaattagaaagcagtatcagagccgagtctttgaaaggttatcttgcaatgtcagtgcagtgactaatgtgtttctataccctgtcacctgtgaacagacatgtgtgagtaggccagtgtgcttcatctgcggtgactttgatttatttgctctgtaaattgggaccaaagcaataatgggaagtgacattaattgtttaacagagtcctctttgtcacatccattgccttctccggggtgtttgattgttgaaactcatgctaaactaattgaaattgccacagtgaggggcaatatccactcaacattatataaacacaaagtgtcatcagcaaatagcaagttttcttcccagttttctatgattaaagaaaacacagacaatttgaaacaataactttttccttccttaattcactaaaaaatttactaaaataaatggtcttggagcacctctgtgagtcacccacatacagagataacaataatatcgaataatcatttgtaatggatacagaccgtaaataatcattacagccctatggtagatactggttgaatagtagcccttactacccacatactccaacacacacacacacacacacacacacacacacacacacacaagccgccatgctaatctcccatcttacaaatcctccctctcattgtgtttccagtagagaggggaattaaaatagttggtggtttaatcagatcttataaattaattatgacattatcaagctccaatatttttgccattgtatttgttatacattctcccagacttattaaagaaattggagaaaactggttgatttaagtgttctttgtcgttttaacttgattggaattatcatagtttgtttacactagggatagagctaaggcgccattgtattatgtgattgaaagcaaataacggcttgtagtattgctggaaagccaaacacaaaatttacatcatagtaaacaaaattatccatttattggtaaatattcttaactctttttcttgaactgtttttgaacatcaatgaaataagcctttttgaaaaacggaatacttggaaaaatgcccaatttactgaaagtgtgtatatgtgtctgtgtgtgcatgtgtatttgatgtattttctaaaattattagataatatggagatagttataatggtgtaaatctcatgactttgagatgattttttaaatacatgtatttcatttaaatataattgtattcagaacagttaaataacctcaatttaatttttgtatgtgggggaatcaaagaagggagttattgaaatctttggataccagattatgatcctgggcagaaaataaggaatatcatttcagcctatttaatattagaattacatatacagggtcctttcaaaggcatattgaaagaaggtagattgaagaatctacctgagggcctgagggtattcaataagcttcagttattgacttgtgcaatttggatttttacaattggtcagtttatggaagtaggtggcaccattttgaagttaacagttaccccttctgattaggatttgcctcctaaactagaggtttggttgttttttttttttgagacagagtctccctctgtcacccatactggagtgcagtggcgtgatcttggctcactgcaacctcagcctcctgggttcaagcaattttcttgcctcagcctcctgagtagctgagattacaggtatgtgctaccacacccagctaatttatatatatgtgtgtgtgtatatatatatgttttttttgagacagagtctcgctgtgtcgcccaggctggagtgcagtggcaagatcttgactcactgcaagctccaccccccgggttcacaccattctcctgcctcagcctcccgtgtagctgggactacaggcgtccgccaccacgcctggctaatttttttgtatttttagtagagacagggtttcaccatgttagccaggatggtcttgatctcctgaccaagtgatccgcctgcctcaacctaccaaagtgctgggattataggcgtgaaccaccgtgcccagccaatttttatatttttaatagagacgaggtttcaccacattggccaggctggccttgaactcttggcctcaagtgatcttcctgccttggcctcccaaagtgctaggattacaggcatgagccaccgtgccctgcaagtgcattaaagttttaaacttcagacacaccatgttgcacccaaactcaaatccagggacgtgagagggatgcattatgcaaattaaaaaacgtcaattaaagtccctggggagtacaaatggctctttttggcctcttgaatccaaaagaagtccttagttttactgctggatggagggtgatcaggaattaaggaaaacaatttttatgtgaaaatagaatgtatacgtgataaaggcctgcctaatttctctagtaatacaatttgattttctgattagctatcttattctgtgattcttgtaattttgtcaggtcaattaactggagttcagtgctagagagaaaggaagtgtgggtactgctagcttcattagatgtcagcagctaggtgcattttataataaaatctgtgtgggataatttagcccatattgttaatgtcatagcatacagaactttcaaaagaagattttggaagcaggtcagattgaacaaacaatgtgaagtgctaaaagaaggaaaagaaaatggtccagaagatattgttggcaataaatgcagatcaatgaattatttagcaagtaatcattgattagctatgccatgtgcccagtgttggtactggttgtccacgtgcatagaatatcacacactgccttgttaacaaggtacatgtttggaagtccttgaacattttttacagagtactgaaataaatattatattttataatgaattgtttacaggttcttcccttccacagtagtgttattagagggacagattttgtcttgtttctttttgtatctcccacacttcagatgtccctggcacagagtagatgttcaaaaatgtttgttaagtgaatgattgaagattagctttctatgagtgtgttggtgggaatgaatcaaaaacaaggtagaatatatttgcaggagccactattagaaataatagtgcactggggccgggcgcagtagctcacgccggtaatcccagcactttgggaggccgaggtgggtggatcacgaggtcaggagatcgagaccatcctggctaacatggtgaaaccccatcttcactaaaaatacaaaaaaattagccgggcgtggtggcggacacctgtagtcccagctactcgggaggctgaggcaggagaatggcttgaacccaggaggcggagcttgcagtgagccgagatcgcgccactgcactccagtctgggcgatagagcaagaccctgtctcaaaaaaaaaaaaaaagaaaaagaaaaagaaaaagaaataatagtgcactggaatagtaccccagccacaagaaataagtgcatttaacaaacattacaaagtaagactttattcagtgactgatcacagaaagaagagtaaaaatacgtccagagtttgggtatgaagaattgttacccaaactaaagaagtcaaaagaaatagcagttttgttgtgaaaggtatagagtttgggttttggggatgagggagctattatgaagtagaagtgtccagtaggcagttcgagatttatgactaaagttgggagagatgtcagggagcaaaataaataaatgattttggagtgttcagtgatgagattataattgaaaccatgaaagtgtatagttgctttcagtatagttccactttctggtgttgttcaaataaagagctgtctagacagtttggggggtatgctgtataggagattcaaacactatatctgaaaatgaaattgatggttaaaattctctcaaggtccaagattctctaaatcttttcttttactcagggaaagaaagaaaacatgagcaagtggaaaacacttctgtaaccaagaagaattgcatacagcagttttagcactgacataacaaatcgataaattaggcagctcaaccatcagagattagtagagtagaggtattcattaattgtgtcatttggaccaaaacatgaatttggagtttgagaaagacatgatctttgtgttctggaatgggcattctagatttcacgtatggttcactcatttggtcaaacatgttgatgcatagtgttacctgcctcccagggtcaactcacatcttctgtttttttctctttctgcagaagatagatgaagagaatgaggcaaacttgctagcagtcctcacagagacactagacagtctccctgtggatgaagacggattgccctcatttgatgcgctgacagatggagacgtgaccactgacaatgaggctagtccttcctccatgcctgacggcacccctccaccccaggaggcagaagagccgtctctagtaagaacccttcctactgtttagcaggaattggagttgcctctggctacccgctgcatgggtatgatgtagtcacaataaggtttggattttttcatttagaatgatgccaaagcaatccccaagcacactcagagttgcaaattgtgtgattctctgtttaaaagtgttgataatacacgtcttcgtgtagtcttattgcagttttttttactatcttttgctgttatgtgtgtgtatttttctatcttagtgttatttatgttcatgatgaaaacttagaaaatgttggcaactaaaaggaaaagactaaaaatttcacctgtgatttcaaataacctctcatataaaaatgattgcaatatcctttcaagatatatcatgagcatatgggttcaaatttaaatacatgcataatttttaatggttgcatagtattttattgtatggaaatattctaatttattttgcaatcttttatgggtggatatttagttttttcttctatttttcactatttcaaattgtataataattaacatattagcatttttattcttatacatacaatcctagaaagaattggtagatcaacgaatgtgcaatgttttaagactttggatccatatttcttatgaagattgaaaaactatagcacgtttgccacccaagttacttaaatttatggtagacaatgaagactgaatttgttggaaatgaagagagaattttctgttcaatgcagtgcttgaccagagttttattagttctaagacacagtttaccttctcatctatgatagccatttgtcatttgctaaaaatcagacataaggacatgctgtgtaaattatgggatgccatgatcctccagactctaatatcgtgtttggcatgccatttagaggttgttactctcctatcactaagtttttgaatgttaaaaatactctatgcaaatatatggaggccctactttgagtccattggattttgaggtttctcatatggagaatatctcataagtaattgttatttattctccaatttctccatttgttagtgtcattggctttgctccctagtaccctgatttctttccattgatatcagattgttttcatctattcaatttgttcatttgggaagagcagttgactcagagacatactgtatgtcagaacagggaagtccttgagggtcatccagtgaaatgaagaaacagaggtcaggagacagcaaatactttgcctgtgtcagaacccacatctcctgatccacaggccaggactctacttacaaatcctttttttcttttctaaaatcagtgatagtcattcttttatccaaacattctttgaatcagtaatttcatacaccaggttatgaaacacggttcaaagcatcacaaaatctttcatttgttgccacttgacttatttggatttttagaaagaaaatgtgtatctattctcccccaccccccacactccactcccatgtcttcatttagcaaggcagcttttctcacctagtagtgatttggaaattattttagaaagatgttttttgctttatttgttcaaaaaaaatatgtagacaacaccaagtccaatttatgcagtaatcccttatggctggaaattttgagattttccttctacttttcactattatttcttgtataataattggcacatttgcatttttgttcttatgcatacgattctagaaattgaattggaaggaaaggaaatattttcatagttggtagtgtaatgccaaacttttttctactctttaaatatcatatttcctgtagcactattgcgctaaggtgtgacataaataaaatgatagaattaacttttataattataataaattacatttaaaatttcaataacttattccaatgcttaaaagatgcataactttacttgcttttccctttccctgataatgtttctagcttaagaagctcttactggcaccagccaacactcagctaagttataatgaatgcagtggtctcagtacccagaaccatgcaaatcacaatcacaggatcagaacaaaccctgcaattgttaaggtacaaatgtaaattttttaatacaggggggatgtaccaaaggattttggcttgaagcagtaaaacaaataagtttgtaggtattaattcagctgggaccccgaagctgcctcataatgatgaaatagattatgaatgggattccgtaaacagcgcttgagctactttaaactaggcagagttcatttacgcatcgtctttgggtgtttggaatggaagtgccactgtctgttagttcttgcccactttattgttacctgcagcattgtgggccacggtaaaatttgctgataagctggtattatctatgagtggctttaagatgcagaattgctgttttgctagctgtctaacctgagaaagattgcttttggaatcaccacaaaacatctatctctgccattaattggatggaatgctggcaatgccataattcagctagtgggctgtattaaacaatgtttgtcttgctattcactgtgagtgaaaacggagcattaaggggtacttaagagagttgtgagtactgggcgtcagcaatcagtggcaaattaaggtttaagccagccgattttttttattcacaataaaggcgctgtagggtcttgttagttacatgttgctgagtaggaacattgaaatgtaggagaaataaaataaaaagctgcataaatgtcatttaggaattttaaatgtaattttctttccttgttctgcaaacagttattcacagctcatagatctagtacacttagactgaacacttcattgaaaaatcccatctctccagaaaacctatatccattctgataaggttcagttcactaattttagctttctttatgccttgtttttaagactgagaattcatggagcaataaagcgaagagtatttgtcaacagcaaaagccacaaagacgtccctgctcggagcttctcaaatatctgaccacaaacgatgaccctcctcacaccaaacccacagagaacagaaacagcagcagagacaaatgcacctccaaaaagaagtcccacacacagtcgcagtcacaacacttacaaggtaggctggggaccaaaacgagctgttggtgagggcactggaagcaaagaaagcacatgcaaagtctgagaacacaccaacttcttgcttccgtcccatcagcgtcactctgtggaaagagaattcagcacttattacagagcgggggaagaaacctttccttggacacaggttaaacatattctattcagctgataggcagtctaattcacaagcaccaaaagactcctgaaatgttagccaggtggtgaggaattgcaacatcacatgatgtttatatgaatctcagaatagctgagataattgaggttatgaacaagctgggctaaccaattcattatagagcttttattttttcccttccagtaatggaaaaaatgaggcaccagtgatttgttatatacaccttaagaagtagtaaatagtgtttatgcagcctctcttgattactaagtacattccttttctaattcttcttgttctttcttcttctttctccctctccttctttctccttctcctccttcacctcctgctttctccccttcctcttcttcttcctcttccactccttcttccccttctcctccttttctacaaccacatgctatgctcacagattttattctgtaaataaagatttgaaaaatcctgattgttttctttctatttaagaaagtgcctagattaaactaaacatctgggttgatttttattatcaccatatattgctggagaaggctgatggttctgaggcagatcctggtgatttggggaaaacctctcttggcagagatacaattttctatcttttaggctcctccttctcaaaatgtcgtggtcttagaagcccaaagaccccttgaaatgggcagttgatttaaaacatgccagcttctactttaaccttgtggtggaagtaggcatattataacacaccaattataaacatatacctctttttttttttcactttcattttcccaacttttccttttaactgcagagtgggagccagtgatttctgctttgaaccatgattaattcgtgtaggtatgctgttattgctgctgattcaatacgctttttttccccagtgttctgaattttcttccctcttcactacctcagtattagcccaggattttcagaagccttcctgtaatattttaaaatggctttccattaggttttccctggtagatatctcaaatccactgcccatcactttctgtcagtttgggaaaatataattagtgaaatggaccgcattctcattgctccagctggatcttcctcataagcactagaacagtttttcctggagtagaaccactctgccataggccttgttggtcatgaaggcctcaggtgaggggaagcagatgagctcgctctagtgagtgaacaaatgaattcaccgggctactcctcaccctgtgctggtcatgcatgcattttctggggccaaatttaaagtccttgtaatatgtgacccagcccggcagcacaggttttaaagttgttttttttttcttttagtaaacttttacaaatcatgacaatgaagaattaaataggcctttggaggaaattttctttagatgagactggctgtatttggtatatatctgtggcaaggtacaaaacgctcaccccagaacaaaacctgttgacaaacagacaaaattctttagttatgaaaggcttaaaagaaatgaaacatggctgacaagtaagaactaataaatgctcaacttcagtgattatttgaattattattcaaaatcaaaatgcggaaaatacatgaacaattagagataactaggaggatcgattgaaattacctttcttaaggtgttgtaatttttttctcactgaacatcacgtatgatctccataaaacgttttggagtcaggttcttttccttaggatgattgtctagccatggttgtgtgttgatgtctcatttatttgttcatttattcatgcattcacccaaataccacaatctacatgaaaaagacacattcctgactttaaggatcctactagtctctggtctaccagtcactggaacagggtggattaaactctcaataaaccaaatcaatactcctctaatggtggaattagagagtctgggtttattcagggatcggattctgtatgtggtttggggactgtccccttcttatggctctcatttcctgtttgcctttggtctcattaactatgactgttgccatctcctctcctttcattgactttgaccttacctgtacccaacaatcagaattcgagagtcttcctttgagcatttcaaatagcctaccctacctcttgaaaaccagaatttcagtgactgattttcaatgtacatttattgtgtcacatagcatatagctaatatctggttatattttctatggaagttgtatgaattatcctaattattagttgagtatcataaaacttggtaaagtttcttcataaatggattctttttgaaaaacttgttatattagacatactcaaaaattaatgtaaaatcagctcatttatctgtgtaaatgaaaaactgaatcaatgtatctaatttgttgaagatatgagcttcatatttctggatgtatgatataccattcaactgtgtagatctaaatctataaatatgcaaatactatttatccaagtaaagtgtctaatttcaggttaatttggacatgaataatattttcacatttcaaaaaaattgattgctggggttgattaatttactttaaagtcgttgaatgcaatttcttttgacaataggataaaggaaacagaatcttggccaactctgtgagtaactattttatggccctgaaaatatcacttagtatcattgggtctcagtttcttcaaccataagataagaaactttattctaaagacctttttggttttgacactatgattttcattacataaataactaccacttgaccttttgaaagtaattattttaatgagaaaaaattgacataaacctacatacacataaacatatgcttatagataagcatagatatacataatacatgaatgtatagcccaagtatgcctctcatcatattttcccctccttctgttcaaaatacaagattgccacagagaagcaattgaaattttgggtgagaagattcttaatccacccttcattattgggaaatgcctcctgtaggaggtaagattcagaaaagcacaaaaggcagtagttagcctctttgcaagtctacacacctttcaactgattaacatggtgttttactttagttgtctatcagatttggggatctgaaccccttctaaaccatctggatcaatgcccacaatttgccatcatctctcaattaattttcagtgagtggaatagttactgcatgagctttggcctcatagaaataactattatcagggctagatataaaattatacgttttaggagtaaaatcaactgaatattcataatgttctgtcgccttatagttgctctgctgttttcttgtctaaacaaaccgtgtactgtattccaaattaaaatagaaaacattatttctctctgatggtatgatgcaaattttgtatctgtaacagggagggttcatttttggaaaaattctattttcatatgtgttttcgaatggtagtttactgatgcaaacgctgtttggaatttgttttagcataatggacttttgtctgactttgattcaatattcagagaattccttagtttagtctttgagttttctggttgtttttccaacttgactgttgtggagagaaaagaaatctaaaagacactcaatattacataattagtttcttttttttttctttagccaaaccaacaactttatctcttcctctgaccccagagtcaccaaagtaagtattaagaaatgtaaccattttctgaaagggaagggggttctaatacatttggctacagcaactccatttcagtttgtttttataaatgtgccatatcttccagtgaccccaagggttccccatttgagaacaagactattgaacgcaccttaagtgtggaactctctggaactgcaggtaagccttatatttcacttagaacttgtgtgtgtctgtctgtatatgtgtgtgtgtgtaataagataacagagtgtactgtctatgtggttaatgaaattaacaaagaatacaaaattggataagaagttatctgcaaatatttccagttgtttatttaaaaaaaaaaaactaataaaaaatattgaagcgcttaaaaaacttagactaactgaagagctcttaggcaaacttctgagttggttgcaaatggtgcccttgcactaagtgctttaagtttaggtacttgaaccccaccaaaaagtgagtcgtgggatgtctaaacaagaaattccttggctctggccattgctgataaggttaaaggaacagtacattaaacaagatgctttgaaccagaactatggtgcctacctgcaccgtggtcattgttgctagtttaatttcacactttgtgtttgctaaattaccttcttatgaaaggtctaatgcatgattgcatgacttggtcaagcagtagagtagttaatttcatggtgtagatatatagtgtatgtgtgtgcagactcacacatatgtacatatatacatatttttataggcatgcacacatagacacaaatctttacttataagcatatacttaacatcatttcttaaatacataacactatttcttaaatacattataacttacatatatgtttaggagtagcttttgtgtgtatatatgatatgcagtagaggccttcttatctgaccagtgaggaccagcaattggtgggtttattaaaaaagttgattcaagcttatactgttttattttacctttgcttaaaacacaaaaatatacattcaaatattacagttttggtagaagatggagatctttaccttaagcttattttttactatttgggggtctattgattcatctttcttgtataaaccacactaatatattattatataatacatattatagatggtagccactttttattgcttgctccttgaaggaaaagattagagacattggtatggtagtctgaattcttctagatttttataatttttcaaatattttccaattccacccatccacaactaatttgataacacttcttttagcaatgaccttttttgagtttttttttacaggaatatttttccacactcacatttcattcatttacaggagattttaccatcttacataatttcaatcaccagtacaatgcacatgaactgtttagtctattggggtactgagacacattgataagtagcatgaaagcaaatattatttactggatatgttccaccaccttctaacaaaggtaggcccagaaagcagtttttagtttgttgagtgtgattgtaatagctgtacagatataaattggggaagctgaagtaaagcccaattgcatttatgtaacagaagtgatttagagctttggaaagcaaggagatgaggacttgaaagatgctgaatgaggctagaaggtaaagtttggaaccttcctggagaataacataaagaggagattgagggagatttgttttttctctagagatattctgggcttgaaatgcagtgcaacatataatgtctacaattgtcatctcctcttaaaatcttcagcaaaattggtcgcttagtagtgtttgaagattgtgacaaacactaattgtacctagaaagaatcacaaagggagaaaaagagttatcaaagggaaaacactgcagcatagttcaagtttaaagacattgattggccaaaagagttttttaaaatgataaaggcagttaaaggactgacagaaatatttaggcaatactatcatcctagtgaatgacagaggtgattcatggaaaggaatgtggaggaaattaagctctccataggctaacctgacttggagagccttcagggaaaacaaacaaacaaaaaaaatgcacagattttgaagcgtaggggtggaatggagagaagatgttgatggagcagaagcaagaaagcaggaaaccaaagggatgctcagatgacaatgaatttggcaaggactgtgaaatcaataaggagcaacaagatggcacacacactttccctcctggatcttttgattgctaagactcttttctacatccttgatctcttgtacacctcagtttcctccatttcaaagtcatattcataactactgataaaattgtctactcaaaagactaaaatataggttgaaaaataaaattgccagtatgcaatcatttttgacacacaaaaatggaattttatgtggttcgatctgaagtaaaacagtttataagcagcaaagcttcaattaaaagtagtatatcgtgattttaaagagcagatggcatagcttggtgaagtttacaaaaccttggcttggatgttgggcaaacccaagtttaaattctgaatgacctcccatctagtgtgtggccttggtccatttacttaacctctgaaagactaggattcttatgcatgatatgaagatggttacaatacctacatctcactgggtcagtgtgaggattaaatgagataaaatatgagtgcccccttattatataagtactcaataaatattagatatttaattactaattctgagttaacttcatttgcagtggtcgttgtaccttacttcttatctttccaacttttgactggtttcacctcttcccttttattgcccttgctgtgtatcctctttggcaatctcatatatgaagttatttattctttttctgtgcctcccccaccccctactattttcacatcaaattgaacaaatactgcttttggtgtaggtatggaatttaccaaatcaaggcagaacactcactgatttgagattctctcagcaacagctacttctatgactacaatttctggcaatcaggcactccctaaataggtacttcacatacagtatcttccttactttctgcccatttcattgttgaggaaagatttatacgttgacacaagctatctaatggaccctgggttcaaagcaggtctgcctgaagagaacttatatctctttcctgaagtctgaattttaaagatagtaattgacatatgttatgttaaataggcttcattgcacttgccaagtgtcattgattggtactgtctgccaggagcatcgtgttgagaaagattctaaggccaagtctgtgctcatggggaatgtcatgatcaattagtgatgtctaccataggtgcagcaggtgggtggcaagggtagaaatagcatttatattggtggtttgttgatccttggtctacaggcttaatcagtttgactgcagcagcagaagtgacccaagctttggctcaggccttctggtgtcttctttttctttactctcacaaattttggtgaaattttccaaatgtttaagtggaaatgtaaggagtcaacaaaattctaagacctccagaataatgcctctgccccatctgcagtgtctttgagaaacaggagggatgagataggaagtttgctttattaggtattgccagctggtctgacttctttgtgattgtcctaaactagctcattttggctgataaaaaaactcttctcttttacaggtgtaaaaactaatttgatttcaaaatagctgttagtaaagcaagatgagagaaaagagaatgctcttttggcagaaggcatttaaatctattgcatatggagattttcagagtgctacacttttttgtttctgaaatgggaatggcaaagcaatgtcagctcaacaaggtgacggtttaaaccacagacacgaaggaatttgggtagggaccaaagtgaccccaaaattttatgtatatgtatatatagtttttatttgttattactgtaaacattgtaacagcagtagaactattttataactgataaaatgagaagagcaaaaaatataatcagatgtcatcaccctaaaacaagtaggccttcataatttttttctccattgatatatgtttttccacattattttcatcagaggggacatgtgatttgatgttatttattttttacttaattttttctctacgctttaatcagcagtcattcaaagtgtactttagtagactcacaaataaacaacaacaaaatactcattaaccaatttgtaactaccacttttatgttgaattttacattgcctttgtggactctcaatttaaaagttcactttgctggaaaaatgtactgacaaacagcataaatattgacaaacggctgtagccttttggcatacatactccttgtgtatgtgacatatctttgggaaagtggaccaaagtaaaatatgggtagttgtcggtagttttaaaaggaaaagcatagcatcagagaactggaaggtgattttgacaggccacataatctattcctgtgcttcaagaatctaagaaaggaagacccaacaaattctttttacagcccattccaatgcttggcgactcttactgtcagagatttcttccatatttcaaccatattcttcattttctattttcaatttcattcattttgacccagtgtctataatgacaattcctttattcctaatttttcttctctggaaatggtaccatcctatttcttgtaagccaaggatagcaaaggaattttctctcccacatcagctttggggtttggcaatagccacctgaaatgccaggttccccttacccatcctctatcccagctctgtggggaatttacacaagggtcaattaatgatatcttcatcttccatgagcaagagttggggaattaggcttatgtcataggaatgttctgaagcttttctccaaggccagtttgttacccagtaaccaggggtgataggagaaatacttaaaatgtactggaggcaggccactcccaaatggactgtggccagccagaggaccagcagggtctgttggatagtcttctgtgccaagtgtgaacacttcagttgctgggtcttgtggagctccagtgagtcctggggaagtaggtgcagaaggagagaacactagggcagcttttatctactgaatattttaacaactgctgtagaggtaacggttggtactcagtgaatatcagctttccctctgcactcttgacacccactccaaattcatgaggcctgaaatatgtgagtaggacaagtcacacacctctctttgctcagtcttcctattttggtgtgtttttaagcaacttagaaactcatctcctaattttttttttcttaaatacctgaattggcatgcaacatatgcaaaatcccactgttaaacaaacttgaaagtaagttgcagattttgcagtacattctgcaaaatgttataaactccaaaaaaaaaaaaaaaaaaaaaaaaaaaaagatgccattggtgaatagcacatcacaagaaacagagccagggactcaccatttatcagagtcattcaattaaacaaacaaacccaaaagaaaactcctccaagaaaatcgtttcatagcgataatgaaaaacaaaacaaaacttgtctttgccttttttttttaaataaaagggctgtttaaaaagatgactgtagagtatgtaccacttctcccagatttgctgtgcagaagtgcgtaagtgtgagtgatgtagaggtgcttgtttattatggagcacatttcaatgcagtaatcataaatattgctaaggttgtgctctgttgaaatatgacctacatactcttgattgtttgtgttatgtgatttgtctgacacccattacattctgggtaatagcagccatttgttgctctgcacagcaggctcttttgacaaaagaaaataggcggcaataaaaaagctatagtctgaattacattctgcaccgagctgcactgctgagagtttgtgcaagtgtgttaacaatgctcggaactgcctcttgtcagccttcagcctgtaatggccatctgtcctcacataaatctgtcaaaacctgctaagttcaagagagagcatggaatataccttgtactgtcaacaccaaaatgtacacattccccagaaaatcaacacgcaggaaataatccagaggttatgggaggcattagcactgttgatttgggcttgtggcatgaaatcgagagtccagagattagtgggaagatgagcaaaggtagtggcatcaagggattgagcactgacctccctcttacttcaggggggaaagttgtgggtagcggaggtgaggctagagaaataacaactagttcagaggcagcaaggggttgcctgtctcatcagcagctctgaaaagtttaacactatgttcaaagaaagaaacatacttcttgcacctttgttttgttttgtttggctttgggtctcaactgtatctggagataggctttccattagggaggcacttggtgataggaaatcttgtcatccgtgagatttctcaatcttgctttgagatattctccggttagagatgtttcagtaaacaatgaagggtttagggaattagccaaattatttttctctctccatctactcactaatcttgaaatatcttccattcaataagcaaatattacctatttgtttcaacaaatggtgcccgcagaaatttccagcccttatatttttactcacagggcatatttgatggtctctgggtgtttccatcaattttaagtgtatatgcagaaaaatatacttatgtcaaattttaaagaagcgcttttctattaaaatcgattgtgaagtccctggaggctgagtccctgaaatagcagtatctggtgtcatatccagcacatagtaggtgttcaacgaatgtctgttcaatggccacaggctgtctaatgtgtgacagaggtaaaaggctttgtttttaacccaaagaaagtacaatcaaggtgtcgccactccccagagcaacttgagaaccagttatttaagcgataatgagcttgggtactaggacaagggtttcaaattttcaagactcagaaggatttctatatttgaaatccctagatacctgagctatttttagaaccagtcgctctttaatagtggcctaatttggcgttcctgaagtttaaggtttctttttataaatctaaaatatctgtcaagatatgtatacctgagagtacaaagtggcgtgcggcagacactctagggctggggttctcagatgtggcctgtgaagcatctcattaaaaatgtttacccggtttcccaagtgattcttgggctgctgaaatgtgagacccacgactaaaggagaatctagaaaaaataaaattagtacaaaataataatgcaacaaatgtgcccaagcaacatcctgcaaagcgcttataactgatttggaaagacaagacataattcacattcgaaaagagataagcaaaaatgtatagtaatatgtgattggtatcaatagagggatcctgacagtaaattactaaagaagtaaaaattaccctagcttggggtgatcatgcaaagatttacggagttggatatgaggatgttgaatgccatttcctccaattcaagggctatgtcattggacatatttgattggtatttactcagcaaagagagattattcctcattatttctttaagtatcttaggctcctaggaggaatatttgagaatgtgcttttttttttatctcgctgggaattgcaagtggtaattgaaggtagcatgtagaagaaatcagtatgcatgaataaggcagtgcaattcgtaaataaagcaagtgaaaatggagagaaaagataagattgaccaaataggaatttattaggttgagtaaaagacatacttatctatgagagaggaaacaagagttgagtgtgcctcagtggcacagatgtttcattcagtcatgtaagtcacttcctttgctacagcaaagagaagggcaaagagccatccaagagcagctgttaacaaagggaagcctttttgagactcaggtgtgaccatgagtggagtacagtgtcccattcactttgtgtttgcatttctctgtctttctgagattttctgagttggaactccgaagtcaaaccaccttgcatttgtataccttttcttctctcagggagaattagctttgaataataaaaattgccaaatattggtgtaaaatatttcactttagagaaaacattcattctttccatttcttaattataaagtaggagagtgaggcagcatcttcctgttcatatcaaaatctcatgtggctttctgtgacctacttggctctcgatatatgtgtgttgtgtatgtctgtgtttattttttttccagcaaggtagcatttttttccttgcaacttgccttaagtctaaccccaggcttgttagcagacttgaagttctttttgctgaatggtattcaccccgcctcctaaacagaaaatgtattgtaaactaaaatgctccattgtaagcgtaaactcatttgaactccagcctgcccttcttcaaagttccttggactctggagccacttgacaatggttcttcctcggcacaaacggatgagtagggcttacttgggggaaaactcaacagaggaaactactacgcttcacggactctcccacagtggtttctgatgaaatgttctgccctcctatagaaaagcagaaagagcaacagctgatggctgttcctctttcttcctttttatttatttaattagttagctgctgaagcttggctgagtttcaatccctcagtctcataaccctcccttatgttgtgctctatataaaatggtcggctggcactgtgatatttagtgttactgttcacttaggtttctgttgcagaaccatattttagacagaatgtattagttatgcttacaagaatgtattatacctacattagccatggtttactaggttaatgaactgtggcgacaaagaatcactgccgttaagttgtagagttgctctaggtccctgcattcggctgtcgtatttcactgaacttactttgaagttgcttatgtcactctcaccattgccccatatttcctgtcatcccatcttttttttttttttttcttctaagttgcttaattccttggctccaagggtagattctcttgattggacaaagacccctgagctgcttgcatcctctgcaatgttctttgcagacaaatgctaccaaggctattccgtgattcctcagtctcactttgttaattttccataaagcagcccatacaatccccttgaaaatgcaagctttggtaataatgcctagttccgtgcaggccaggggtgatgcattcatgttttctgggaagcaggatttgttagcattggtgtttgaaatacaaaagatcacagcctcctgctcagcactgtagatccatcttttcttggtgacagaggcttaggggatgagtcagtttttcaggccttgtcatgaaattagtttccttcttcttcactcagtttgaacccttgtctgaaatcttggaaaaattagaaacatgtgtcttcgcatttaagaacattatctctgtctcttttctttctctctctttttttttttttttttaatttttgccttaggcctaactccacccaccactcctcctcataaagccaaccaagataacccttttagggcttctccaaagctgaagtcctcttgcaagactgtggtgccaccaccatcaaagaagcccaggtacagtgagtcttctggtacacaaggcaataactccaccaagaaagggccggagcaatccgagttgtatgcacaactcagcaagtcctcagtcctcactggtggacacgaggaaaggaagaccaagcggcccagtctgcggctgtttggtgaccatgactattgccagtcaattaattccaaaacagaaatactcattaatatatcacaggagctccaagactctagacaactagaaaataaagatgtctcctctgattggcaggggcagatttgttcttccacagattcagaccagtgctacctgagagagactttggaggcaagcaagcaggtctctccttgcagcacaagaaaacagctccaagaccaggaaatccgagccgagctgaacaagcacttcggtcatcccagtcaagctgtttttgacgacgaagcagacaagaccggtgaactgagggacagtgatttcagtaatgaacaattctccaaactacctatgtttataaattcaggactagccatggatggcctgtttgatgacagcgaagatgaaagtgataaactgagctacccttgggatggcacgcaatcctattcattgttcaatgtgtctccttcttgttcttcttttaactctccatgtagagattctgtgtcaccacccaaatccttattttctcaaagaccccaaaggatgcgctctcgttcaaggtccttttctcgacacaggtcgtgttcccgatcaccatattccaggtcaagatcaaggtctccaggcagtagatcctcttcaaggtaaaccttggcaaaaccctaataacacaaaaggtgttcctaagaagtaaaaaataaaataaaatacaaataaaaatttgaaatctgcagccattctggcccctgaccactgcaattctggcactgctggaactaacgagaacattgttacactcacatctctctccatgttctcttaaatctgtcacctctgagcacagtgccttgagccagtcctatcagagagagcaatttgttaagaaacttgctcatccaactttttccattacctggagagctgccctgtgccaggatagtggagatccatgcaagataaagctgacagtgtaccagacctggtgctcagtgttaacatcaataagagacgctgagagagagcacatcactcccagccctctaagttgactagatgatcacaaactgtcactgggaaatctccctagtagctgggaagaaaaagccagtctctgtaatacagtgtcccagaggatgctccacagtgccgataaacttgggttaagtggcagttgcaaatgccctttttgcttttctcctctggcgcagatcctgctattactatgagtcaagccactacagacaccgcacgcaccgaaattctcccttgtatgtgagatcacgttcaagatcgccctacagccgtcggcccaggtaatgaggcatgtcattttcctttagctccctttatcccctccttgagatgacaagatgttctccaaaaccctatacccctccccatattattattcattttgctcatgaaaattgaggtggttgacttagtgataaagttatgtttcccaggtatgacagctacgaggaatatcagcacgagaggctgaagagggaagaatatcgcagagagtatgagaagcgagagtctgagagggccaagcaaagggagaggcagaggcagaaggcaattgtaagtggcctggagctcacttttattttaaagtagggtttcttctttttctgtgtgctttttttggtgatagattagaaaataaacaaaagctaagtctttgttagaacaggccattttcagccttttggctttaaaatatccataagtcttcggtccccattgacctaacttattggaaaacaaaatgtttaagtcagtatatttctcactcacagtttcattttgaagttcattactgttttcaccttctgttttgaaaaatggagggagtagagatttttttttcagtcagatatttgttctttctgatcacaggataagtttttctttctgtttcctgttacttctctctttgagcggaaaatgaggagggattgctatctcgtttcagtttttgtctttttggccggcaggagacttaaattgtccatgaagagactgagttcaagttggatttaaaggagcagtggaggaagagttgctaagaaagtcatcatttctggccaggcacgatggctcatgcctgtaatcccagcactttgggaggccaaggcatgtggatcacttaaggccagaagtttgagaccagcctggccaacataggaaacaggaaacgacataggagacaggaaaccctgtctctactaaaaatacaaaaattagccaggcgtggtggtgcatgcctgtaataccagctactagggaggctgaggcaggagaattgcttgaaccagggaggtggaggttgcaatgagctgagatcgcaccacggaactccagcctgggtgacagagtgagactctgtctcaaaaaaaaaaaaaaaaaaaaaaaaaaaaaaaaaaaaaaaaaaaaaagtcatttcttctgcgtgatggtcgtcatctaactgggtaattgacacacccacatttcttatgaactacttttcaatgacattttatggatttcagcaccacttaccagggggtattatattaacttgacatatagacagtgctgacccttctgtgtaaagatccacgttatgttatatttgtttgctgtctgaagatcagtcctcattttcagcagctgctgactagtgggtaggctttaccccaactccctaccgctgtttatcaacctagactttggatggcaaaaataagtcagtccagttgtcaaaatccagcccatgcccatggcagacattcctaatcgataatggaactctttcccattgagccccctcagagccttacggtcttttctgacatgatgctctagggagccatgactaatcaatgagatatagcactgcttttattcagtgcagctgctccctgtgtgctagccactcagagttagctcagtgaagatcagcttttgacatatcttgcatctaagctagccaaggcttagggaaatgatttttgactgtaaaggttagatttatgtgttatctttaaaaaaactcactaacatcaacacaattttgcaaaagctatataaaagagctgactaatggaatcaaaatcaagcattggccaacagttaccagctggaggaaaaaggttaaatgagagatttgttcaacacaggcacttaaggagaaataagtgagaagtaactgaacacttaggtcaaagttttggagggtttgctgccatttaactttgaatctacctaagactgactcaaaggcattttgcaaattacaacaatttgcctcatttttctcaacttccaaatgagcagtgatattaagatttgccaaagtgtcattagttaacacttacgaagactaatgaaaattaaaattcaatttttctaatatcactgtatttaattaatggcctattcaataattataataactcacatttatatagtgccatataatttacaaagccttttaatatggcacattataatcattacaaaagaaaatcatgctgagcgaacatgtaggaaaatgattattttggtgtttgcaaatttatattttataaaatccttcatttttcccccaaaaataggacattaaagagaaagattaatagtttcatcataaatttgcttatatggccatgacacaacacagttgtaactaaagccagattaatattttaatcaaaagcatgtaaataaatgatgtgtttattttatgccttctaaagatgattaagtgccagatattaataaagaaaggaagggaggtgtcttttttgttgctagttcggccctttacagatagagcaagtagtgtcattggtctagatgacacaaaatcaccctgagggtcaccagcctcagcttggaagcagatgctaccctgttgtccctttgtgttacaaatgttgactagttcctctgttaattcttagatgaaagtaatctgtatcagttctcttccaaagagcacttgtaatacaagtgtcaacttgatttttattaaatcattttacattaactagacatttgtgagaattttggctttaaaattcgcttttgtttttgaaaagtagattgaaggaaacctagaacatagagattgtttaccaacagagtggactataagtgataagtgcttaataaagatttgggacttactgtttaaccaatttccacttggacaattacatgctgtttctattgaacatgagtgaaagctcatagctctttctgtaataaatatttgccatttggttgggatataaaattaggaaagacatcgtccctgtatccaaggagcttcaaccatactggcagataaaaatacacaaacaggcaatacagtgtgataagtgctattataaggggtgcatctgtggcactgttggggtggtatattgggggcatccagatctatatatgaaggagaacatcctcagagagggtataagactgatccaaatcctaaagggagaaaggacaaagattttctccacctgcagcatccaatatggtagcctttagccacacggttaatttgattgggccatattaagatgcactgtgtgattggatttagaagacttagtataaaaaaatagtgtaaaatacttcatttatctttttatatcaatcacaaattgatataatagtttggacatgttgagaccaatacaatatattattaacattgaatttttcatatttttactttttaaaatgtggctcttagaaaattttacatgacatactgcattgtatgattactggacattgcttttttagacagcggctatagcttatactaagtctctaaaaaagaataaggtatattgagaaactactagtcgtttaattggaacactgagacacaagaggggcaagaaataagtctagagggaatggtggaagatagcctaaagggtcctataattcatgctaaagattttgaaagctatcttgaaggcatcatggaactatttaatgagtttacctacatgaattttttttattgattcccttcctccaaatagttagctttctagtaccataatgcatccccaaagtatatttttatggacttgagtgcagggatacatgcaatgatttttaactgatttgaaaaaattagcttgaaaattcatacatagaagagctaagggaacaaggacagtccagacttaagttggtcaggtacatgatgttctttcaatgtttgaaacaaccttaaagtaatgagtaagaagcaaattacatttaagatatcttggggtcagtgttgggttgttcattaatcaaagcaatcatatatttagggaaccagaaaaacagagactccaaaaggcaatgaaaaaaaaaaccttcagaaatttaataattgttattttacaaaattaaagtcatctttttaacctttgtctgcattacttctattttgagttccataagtaggaggtgttttaggagatctataaacttttcattgcttatgtttctaaaatcctaattcagcccaagttgagtgagccaaatccaaaaacaaagagaacactaataattagtaattaccaatgcaaaatcttatattgtggttgaatgttaccattgtttcagttggcactttcctgtaatttccatcctgactctttctcaaaaagcaattcactttctgcctttctcagactcgtaagcttgaaataattcaggttatattgggactctgcaaaccagagtttagtacttagtgtctaaactgtcactgctctaatttcttgtggagttctaagtccaactccatttgcaatctgtacagttttctgccagaaaacatgataatgggatgttaatttaaagggcaaatctagacattgtgatatggctcagcactcaaaaccaaaactagatgtgctcaggcggcaatgactgctgcttcacttctctgttggtcagtgtccagctcagaagccagggacagtgtagtactgctgataattataaacttcttccaaatgaaatgaaaaaaattgtgcaattactcagggttttttttttttttttttgagatggagtcttgctctgtctcccaggctggaatgcagtggcgcaatcttggctcactgcaagctccgcctcctgggttcacgccattcttctgcctcagcctcccgagtagctgggactacaggtatccaccaccacgcccggctaattttttgtatttttagtagagacggggtttcaccgtgttggccaggctggtctcaatctcctgacctcgtgatctgcccacctcggcctcccaaagtgctcagagttattcttttttggagaaaatgaaatagctttctatgcaagcctctttaaagagatattttgtgtgggtgagtatatgttatattgtgactctaagttcaatatttagaaatattcagttttatggaaagatgaataattatagagatctgctatacaacatagtacctatagttaattatgctattgtacactttaaaatgttgagaggatagatttcatgttattcacacacacacacatacacacacacacacacacaaaagaaaaaaacacaacacaaggaaattttggaggtgatggatacatatagtaccatgattgtgatgatggtatcaaggatataggcatatgtccaaacccatcaaaatgtatatgtttaatatgtacagttttttgatatatcaattatgcttcagtgaagcttttttaaaaagtagttatgcatactcttattctataattttcatgttttctgacttaccagtatgtttacttgcatgttagcttttatttgcatcttaccttttaaatagactaacctggacttattcacattaaccagacttagacactaagcagggatagtagcacacggtacgtgaatgggggacactttggacaaatttaatgctacaattttgttttttctctaagaacaccccctagtagtaggcatttattgactacctaatgaattaggttagataatcaatattaacggcaagaaagaaaaacacttctcagcattttttagaatcttggtatatctttctatctgtacctttccatgaccctccactccactcacctcttcttttagttggaatacaccatacactcaatttataatatctttgcaatttttgaggcagtcaggttacagctaatctaggaatgaacactagtatttcactgccaaagttgatatgtagtttccttagcatagaaaaaaagatttttacattattctgacttgcaaacgtagagagctgaaatctacattatatcaagctcttccttgttacctaccttaaaggacattttagagagatcacccattaaaagcattaaatgcagtacttggcatagctaagagttcaacaaatgttcatctctctactaccttctgtcttttctttgtcaaaccccttttatcaggagtagtttatttgatgagaaacaaccactgtatgttttcctccagtaactgggaagctctagactctttttgataaagattttagtaatgtgaagtcagttaattcagtcagtttcttgtttctttatttatcccccacgttttggtgtagtgaggatttactatagatgttaatgcaatgtaagtcttcaattttattatccaccccatcagcgtactagcttttatgaaaactgaagctaaaagttatttgataaatgtaccatcctcctcaatagtgaaaactggtccgaaaatcatttttcgaggagctgtttccaaaggtttagagttcctccaagcctttaagaagttgaaaatgtcattaagcattttgatttcttttcctttcatctcctgtttagaaattaatgtcttgaaaaattggctgcaaatgttaagcttttttaaagatatgaaatctattcatctgtctaatacaactgcaacatgtttaaaagaatcagttctttgctagacattttggccaatcttagaaagatttttgtctttgctttctaggcatttggatgccttttattttcatttttagcagtaggaaaatcaagcacttcaataattttctcaaataagcctttcaacatgtattcaatctctgatctttgtaaggtagtgaggcatggccccattcctgtgtttcataaaaagagatggtagaaaaataggtaattcaagtaattgtggaacaccccttcggtttcctgtttctcccctctaggttatatcttctttttactgtagaatgtatcagtatccattataaaaggtcctctggtttatattttgtatgggatcgttgttgcatacaacttcgtataaagctgcaattcagagactgtcccagtatgtctgcatatgggcatacatatggtcgattttcgctttaacttcaaatttccttgaatacataggctgtgtttattcccataatggtagttgagcaatttctttgcaatgtctcaatttctttctctcacttctgcacttccccctcctctctatacagtagtaacttttctaaaaggctcattaaaaaaaaattccttaacacccgtgaaagcaggcgccaggaaatttaagtttagatagcagtcccatcacatttggctgtttgactagagctggctgcataaacagaatggaatgtggtgttatgattcccttgctcaagtgtgtatcgatggtctgggatgtgcctcttcatccatttctactttctgactgccaggatgtgctcggtgctctgaagtggcacaatcacagccttcaattgagacatacaatctacatggaagggcgtcaggcagcctgcactggttactctgcttcatctggtcatttatttagtctcaatgctattgttcgtagagttctgttttaccaactgtttgttatctcctacctttgattttcagaggtgatttttatgagtgagattcctgcaaacatgtagctacttcttacacttaaatctgtaaaaacaaattatggaaatctttgtttcttcactcagctgagctacttgagcaaggtttttttttttttctgtgataaaacaccaaatctaacttcccttctcctttgtattggagagtctcagagaagaaggaccactcttaggcatctttgatgtaatgaagggaatgggataagtgttcaagatgattaattgattagtaactgattgattttatagcagatattcattgatagtctgttatgttttgatgctttgtttaaaatacagtagtgaatagaacagatatggtctctactgtcatgaagcttttattatcctggggaagtggacattaaacagtagataaactattaattacaattggaaaggagagttttccataagagcaactaataggaattctgacctcactgcaagtctcagaaaaaatgtgattgttgagcttaaggttgttgtagacagtgtgtgtatgtgagaggcttgggagtggtgcagtgtgaatagggtgtcccagtagcagggaaagagcatgtgcaaaggctttgggaaggaaggtgcacagtatatactagactaatagaagctcagtgtggctggaaaagagagtcacagaaagaatgcgatataagagataaagcccatgatgacaacaggcccagaccatacagggccttgtaggtcttgttaatgatttaggtctttcattaaaagttatgagaagccattggaatattttagaagttaatggacgtcattggattcctgtttccttagcaaagactatcctaacaacaatggaagaatagattggagaagaataaacatggacacagatccaagttaggagattgtttgttatactagtccagaaagagaagctggaggcttggcttaggacaatggaataaagaaaatagattacagagagatttaggggataaaaattaataggacttgagtggttagacatgtggagaggaacaagagaaaggagtaaagggaggtagttaaatttctgtcctaaataactggctagatggtgttcatttcactaatacaagaacattgggaaagaaccaaatggggagagggcaaggctggagggtcgggcttcggtaatgttggtgtagtgtgaggttcctcaggcacaaccaacctgagatgtcaagtagacagttgattatttgcacctgaggctcagatgaacttactttcctaataaaaaatagaggcgagcatgttacatgtggtagaataagaccagacattggtaagcttatcatccaggaagataaagggtctgcaaattgttcagttacatttcacaaatgcttgtcgggtgcctactccttaccagattcttggccaaatactgggcataagaaaaggaaaaccattcagtaaataagaaagggcatctttttgctttcagtccaaattactcttttcatcacccaagaccagggactctcagtacatccaaagaaaactcttgggcaagctaagtctgtacctcagttctctgcttctagtctttgcttcaacctagcttaaatctctgcaaccttaaattcattttatcattgtttgtccttagtatacatacaaactagttggtgagcacattctttatattaactccttatgttcttaaaactttgagagacatcataacttttggccttatcttcttggaacaagaggtataggattgcttcttacactaagaatgcatttctgtgctgtaaaaaaagaatttatcctcaggctataaatattattcctgtattttgtaggttataaattactgatgactttcagactatgatgatattgactccacttgtgaaaattaggccacacccctctagtctgttcctaaaataagactagatttattggcaaagtgaaatttatagcctcttttatttagctcttattcttcggagactcatggcttaaaatggcctacattttaagactgtatttcttaaattattgtctttggaccacctgcatcaaaatagctgaggtgtgcttgttaaaaatgaaggttgtagaaccttatcttacatttttttttagtacaactagataaagcccaatcatttgcatttttaatcagcaccccaagtaatttttatgtatagtagagtttaagaaccactcttttgaggacgtcagagtttgttcatctcagtattagaattctgagttaatgagaaatgtaatagttttgtaagccaggtcagtttcataacaattttgattcataatcaagtcacaaatgttcaaatatttaataggtattgttccatgatttgaaaaaagaatgcactatacagatttcttttctaacacatcaagttcatctgagagtagaacagagacagataggaaaggtagaaaagagtagaggtgaagagaagaatctatgtgagcaagaagagattgatactgaagaaatgggaattaatacttggttcaaatgtagtctttccttccattgtagtgtatgttttgctctaattgccatgctcagtggggtttcttatgcatgattgtacatttatgaatgtttctagagggttagctttttttttttttttttttttttttgagatggagtctcgctctctcgcccatgctgaagtgcagtggcacaatctcagctcactgcaacctctgcctcccgggttcaagcaattctctgcgtcagcctcctgagtagctgggattgcaggtgcccaccaccacacctggccaatttttgtatttttagtagagatggggtttcaccatcttgcccaggctggtattgaactcctgacctcatgatccacctgcctcggcctcccaaagtgctgggattacaggtgtgagccactgtgcccggccgagggctagcttttttcccactccagaactctctccttccttccccccataggaagagcgccgtgtgatttatgtcggtaaaatcagacctgacacaacacggacagaactgagggaccgttttgaagtttttggtgaaattgaggagtgcacagtaaatctgcgggatgatgggtgagaatcttcaagattatttcttgtttagaagctgacgtatgtaaaaaattatggccataagattactgggatgggagttgccaatgtaagtgctttgacagatgacatgttgagttcagaaccttatttattttctttcatccctgtttattaatctttctagttgagatttcctgtcccagaaataagtatttagctgcttgacaggacaatcacactgataaatggattcagtggctcagacgttggcactggagaagtctcacaaagtagaaagggttacagtcccatatactaatacttcttaaccagctttgaacttttctttgtccgttgcagagacagctatggtttcattacctaccgttatacctgtgatgcttttgctgctcttgaaaatggatacactttgcgcaggtcaaacgaaactgactttgagctgtacttttgtggacgcaagcaatttttcaagtctaactatgcagacctaggtatggattttattgtacgtggaatgaggaatccataatgtagagctcaagatgggaacaaacataatccgtaggcaccttgggttgaaccatcactttattttactaaagggaatgtttgaatacagatttttaagaaaaacgtataagacagtttcagaagaaaggggcctaggttttggcaagaaaggacagaagtaaattctttgtactatctactcaggtgctgaaaattgtggtaggtatgtatgtggatattgtgtgtttccacatgtgttcatgatttctgtatgtgtgttgtgtgtgcatgcagctttatattttgtgagtgcatgtattgtgtgtatctctgtggatattgtgtgtgtctgtgtgtgttgtgtgaatattaaacatgtatgtgtgtagtattgtgctttgtgtgtgcgtgtgttatgcagatgtgtgtggctatcatgtgtctttgtgtgtgtatgtatgcaggtattgtatgtgtctacatgtgtttatgattcatgtgtgtgtgtgtgtgtgtgtgtttgtaacctgattttgccttccaggcctaccctgaatcctttcacgaaccatagcattgccatcattgttttatggaacagaatatgcaagtctcattttctcttattatttcacagacacttagaaatatcatcattttctatgaactacaactaagagagaagaaaattaaatttcatatactaaatcacactctgctttctttaaaaaaaaaaaaaaaaagaaagaaacacctgttatttgttgagtgcttccatatgccagacactgtgccaggagctttgaaagcattttccatttaattactagaactatcctaggaggtgtatattattactatcatccccattttacagataaggaaactgaagcatacataatattaatttttcctgttataaaagctgtacagactcaaggggtaaaatatggtaaatataaaaaggtattaagaaaaaaattaaaatcatgtatcagcctgtcatccaggaataaccactattaccaacgaagtgatttgccttccagtattttgtctcagcatgtctaatttcttacagttgaatttatatatatatttatttatatatatataaacttccaaattctacttttctcaattaatatataaattcgtgttctgctgtgactcacaagattaaaaataatttattaacatactttaatggttgtacagtattttgctgagtgaatagtaccattatatttagtcattacattatagccaaacatttaatttttaatttttcaatattataaataatgctaaaatggacatcttaatttcctttccaattttaattttgttcctttgcatgtcattccccatctaatgtgtgcatagtaagcctttaaattctttgaggaaggaaagtgataagtgtcttgtgcatatgacataattatattaaatttatttgtaatatttatcatgaaattaacatataaatctagtcctcatcattattagatatctatatgcactttctctgggttggtaaaaagaaggaaacaaatacaaatacagggattttttttcttctgtccaacgaagggatgtcttcctagagtaattgatacaggtgatgtgcattgttcacagggaatatgctataattcactccacaagctaaatagatagtaggaagcagtggagaggcagctgactgttagagagatagcaggctagggatgaaaatatagaatgtggcaagtcatttgttcaaatgttggctgataaaaacagtcaagacggattgaagtcttgagttgatttgacttattttcttcagtgatgaaggccagggtgtttctagtctctcaaaacatctagagtttaaaataagctacctagaggggcctttagatcacgattcatcactggtagagagggaggattggatggtatttccaaattgaactggagcctccttgaaatatttctaagaaggatgcttcctctctcgttatctccctgcctagccggcagcaatagaaactttgccattgctaagctcgctctgtattttctgaaaagtatgtttgatgtgcattgtagtaggatggatttttccaattccctcaagctgtacgatggcacaaaggtagtttttttctgagctccatcattgtatagtctgaagaggccaggctttggaatcccgcagacctgggattgaaatctgacttaccactgccgttgggcaaagaattcaaccccttcagttctgcttcttcatttgtaaaataccatatagtgttattgtgaagattaaataaatgtttgtgatgctattagcacgtgtctggcataacataggtgctcaataaatagtggctatggttataatttaaaatgatgggaatgagaagttagaagtgtaaagtcgttttaaaatggaagaatcgactctaggaatcagctttggaactcaaaacatttttcctgtgtcttgtctttgttccctgaagaattcaaatattcttgtgctcaccatattcagtgttcatgcacatttcagggcataagaatatactggactcaggggttaggagcatacacatatgtcacaatagtaaagcaaaaatgatgtgacacagattagttttaccaagacaggaaagttacttatcattctagatagatttaaccaattttctttctgtttacttgctcccccaaattaagttagcttatacatcctatttctctactactgaaactagataatggtgactacaatattgttagagcaaaacataacgatttcagctactatttatgacccagtattataaatgagagtgagagattaaaatgacttgatcaaggttaaaacagtgaagcccagatttaagttctagttgccatgaatcagtagtctgtgtgtctttctatttactgtcttataagcaaatggatctttctaaagacctcaacgaaaaaaaatcagaggggaaagaccaagagaaattaaagtaggactacaggatccaaacagaaagatgggtcagtattatgaatgtaatagttttgattaggaattagttatgttacataacttaaacatttaaaaaaataaatgacacatacattataaattattcattaactgaaatgaatgtattgtattatcagtattcttgattatacacgtaactttatgtatttctttgccattcattgataaatcgttcccacatcccaatataaatattttcaaccatggttttaataatattttggtgtttgagattagtatattccttcaacaaatattaatttgagtgcctcctttgtgccaacagttttccaggtgctgggaatataagtgtgatgtgatttgtttcaaataatacagtatcattatttctaacaatttattttgaaaaattagagtggcttgagttattactattttcatgcgtgtccatgtgaagagaccaccaaacaggctttgtgtgagcagtaaagctgtttatttcacctgggtgcaggcgggctgagtctgaaaagagagtcagagaagggagatggggtggggccgttgtataagatttgggtaggtaaaggaaaaaggggggttgttctctggtgggcaggagtgggggtcacaaggtacccagttggggagcttttgagccaggatgagccaggagaaggaatttcacaagacaatgtcatcagttaaggcaggaacaggccattttcacttctttcgttgtggaatgtcatcagttaaggcaggaaccggccatctggatgtgtacgtgcaggtcacagaggatatgatggcttagcttgggctcagaggcctgacacctataacatttttattatatcttactgtgctccaatatcctttcattagcgggagagaaattggtggagtagatgttattgcctcagaaattaaatgtaaccacattctatctcatgcaacaaaaaatatttttggttgttttctgagtaacagtgtgcctgtataagtgggtatatatgtgaacactatatttcacagtgaagaaactcttgagaactactatttcacaatttttttaaatatttgctaataaaatacagaaacactgaaattctagagtttgcttagaatattgcaaagtaaggaaatttaaaatattctcaaagagttcctcaaggaaaggtatgtgtgtatgtccctgatggttccaggctgacttttatcacacagactccatcactgggggaatcttccctcttgatctacaatgcaagtggaattctgatttcagactaatctctagcaatgagctagacatttttttttttgtctctacaaaaaagattttgatttgaacagcagttgtttgtgaggccttagcaatacaagaaaaccattcattagcctatgaagagaagcgttgaagccagtgtaatttaagaattgactatttaagatgctattgaggaaagattggccagttttgtctccgttttttatgattgagactgtaattgttctcgttgctcttaccttaaaaaacttgctgaaaaaaactcagtaaagaccaaaggtgatcagaatgaaaggaaaacataaataaagacatttctttgtctttaaatctaggtatgtaaaggtagattgaaactttggaaatgggatggtcaggccggagctagagagcttggtttgcaatcttgtcagcaaaacaacattttaggtcaacgattatgcctctgtagtatctagtattatatccttctattactttgaccatttcgattttgtaatttactctgggaaaaagcatgggaattcttgtattttggtagaattgttagttttccagaatggttttgttttccttcaaataaatgttttcaaaagaattaacgtatttataagaggctttttattatatttccaagcccccctttgttacttgcaagaccagcagaaatatctagctttttcatagaagtcaatggagaaaaaccaggaatatttaacagaattttactttgctttctatattgctaaaacatatctattttgttaaggtctatttgaagtagcagtgaaactgctcaaaagcttacttggactagtttaagagtccaagaagggcatggctttatttatacctgcactttatttcttctttccgaatttactctcctgggatgtgaagcatttctctcaaccttccaatttggggagaatttgcaccaaaaattctgggaggccaagaggtacggaagtagaggaccacatcatatgtcccctcctgcctcaaagagaagcatcaggttgaagtttaggggaaattctcatgattctttctctcatactctactggattttatgctcaattaaattaatcccattgaataggaaaattagttccagcttgtactctcacgtctacatctaagttattgaggaaccatgggcaagtcatttgacgtgtcgggggaaggggagggtggttatctgccagagatatattaacgtgtgctctgcctaactcccagggtgtttaagcctaaacgagtcaacaggtgcgtgtttttgaaagctcactactccccatcctcttcctatatatccatatatatccaataaaatctgactattgttttctaaagtatattgattggaagagttgttatcgaatccagtaatcttgaattggaatgattgagttaatggccatcagcaaagtgtgtatctaaactggcttgtgttttttttcagattcaaactcagatgactttgaccctgcttccaccaagagcaagtatgactctctggattttgatagtttactgaaagaagctcagagaagcttgcgcaggtaacatgttccctagctgaggatgacagagggatggcgaatacctcatgggacagcgcgtccttccctaaagactattgcaagtcatacttaggaatttctcctactttacactctctgtacaaaaacaaaacaaaacaacaacaatacaacaagaacaacaacaacaataacaacaatggtttacatgaacacagctgctgaagaggcaagagacagaatgatatccagtaagcacatgtttattcatgggtgtcagctttgcttttcctggagtctcttggtgatggagtgtgcgtgtgtgcatgtatgtgtgtgtgtatgtatgtgtgtggtgtgtgtgcttggtttaggggaagtatgtgtgggtacatgtgaggactgggggcacctgaccagaatgcgcaagggcaaaccatttcaaatggcagcagttccatgaagacacgcttaaaacctagaacttcaaaatgttcgtattctattcaaaaggaaatatatatatatatatatatatatatatatatatatataaattaaaaaggaaagaaaactaacaaccaaccaaccaaccaaccaaccacaaaccaccctaaaatgacagccgctgatgtctgggcatcagcctttgtactctgtttttttaagaaagtgcagaatcaacttgaagcaagctttctctcataacgtaatgattatatgacaatcctgaagaaaccacaggttccatagaactaatatcctgtctctctctctctctctctctctctcttttttttttctttttccttttgccatggaatctgggtgggagaggatactgcgggcaccagaatgctaaagtttcctaacattttgaagtttctgtagttcatccttaatcctgacacccatgtaaatgtccaaaatgttgatcttccactgcaaatttcaaaagccttgtcaatggtcaagcgtgcagcttgttcagcggttctttctgaggagcggacaccgggttacattactaatgagagttgggtagaactctctgagatgtgttcagatagtgtaattgctacattctctgatgtagttaagtatttacagatgttaaatggagtatttttattttatgtatatactatacaacaatgttcttttttgttacagctatgcactgtaaatgcagccttcttttcaaaactgctaaatttttcttaatcaagaatattcaaatgtaattatgaggtgaaacaattattgtacactaacatatttagaagctgaacttactgcttatatatatttgattgtaaaaacaaaaagacagtgtgtgtgtctgttgagtgcaacaagagcaaaatgatgctttccgcacatccatcccttaggtgagcttcaatctaagcatcttgtcaagaaatatcctagtcccctaaaggtattaaccacttctgcgatatttttccacattttcttgtcgcttgtttttctttgaagttttatacactggatttgttaggggaatgaaattttctcatctaaaatttttctagaagatatcatgattttatgtaaagtctctcaatgggtaaccattaagaaatgtttttattttctctatcaacagtagttttgaaactagaagtcaaaaatctttttaaaatgctgttttgttttaatttttgtgattttaatttgatacaaaatgctgaggtaataattatagtatgatttttacaataattaatgtgtgtctgaagactatctttgaagccagtatttctttcccttggcagagtatgacgatggtatttatctgtattttttacagttatgcatcctgtataaatactgatatttcattcctttgtttactaaagagacatatttatcagttgcagatagcctatttattataaattatgagatgatgaaaataataaagccagtggaaattttctacctaggatgcatgacaattgtcaggttggagtgtaagtgcttcatttgggaaattcagcttttgcagaagcagtgtttctacttgcactagcatggcctctgacgtgaccatggtgttgttcttgatgacattgcttctgctaaatttaataaaaacttcagaaaaacctccattttgatcatcaggatttcatctgagtgtggagtccctggaatggaattcagtaacatttggagtgtgtattcaagtttctaaattgagattcgattactgtttggctgacatgacttttctggaagacatgatacacctactactcaattgttcttttcctttctctcgcccaacacgatcttgtaagatggatttcacccccaggccaatgcagctaattttgatagctgcattcatttatcaccagcatattgtgttctgagtgaatccactgtttgtcctgtcggatgcttgcttgattttttggcttcttatttctaagtagatagaaagcaataaaaatactatgaaatgaaagaacttgttcacaggttctgcgttacaacagtaacacatctttaatccgcctaattcttgttgttctgtaggttaaatgcaggtattttaactgtgtgaacgccaaactaaagtttacagtctttctttctgaattttgagtatcttctgttgtagaataataataaaaagactattaagagcaataaattatttttaagaaatcgagatttagtaaatcctattatgtgttcaaggaccacatgtgttctctattttgcctttaaatttttgtgaaccaattttaaatacattctcctttttgccctggattgttgacatgagtggaatacttggtttcttttcttacttatcaaaagacagcactacagatatcatattgaggattaatttatcccccctacccccagcctgacaaatattgttaccatgaagatagttttcctcaatggacttcaaattgcatctagaattagtggagcttttgtatcttctgcagacactgtgggtagcccatcaaaatgtaagctgtgctcctctcatttttatttttatttttttgggagagaatatttcaaatgaacacgtgcaccccatcatcactggaggcaaatttcagcatagatctgtaggatttttagaagaccgtgggccattgccttcatgccgtggtaagtaccacatctacaattttggtaaccgaactggtgctttagtaatgtggatttttttcttttttaaaagagatgtagcagaataattcttccagtgcaacaaaatcaattttttgctaaacgactccgagaacaacagttgggctgtcaacattcaaagcagcagagagggaactttgcactattggggtatgatgtttgggtcagttgataaaaggaaaccttttcatgcctttagatgtgagcttccagtaggtaatgattatgtgtcctttcttgatggctgtaatgagaacttcaatcactgtagtctaagacctgatctatagatgacctagaatagccatgtactataatgtgatgattctaaatttgtacctatgtgacagacattttcaataatgtgaactgctgatttgatggagctactttaagatttgtaggtgaaagtgtaatactgttggttgaactatgctgaagagggaaagtgagcgattagttgagcccttgccgggccttttttccacctgccaattctacatgtattgttgtggttttattcattgtatgaaaattcctgtgattttttttaaatgtgcagtacacatcagcctcactgagctaataaagggaaacgaatgtttcaaatctacttctgcttttcttatttatcgtaaccaaactcctggcatgtttctcagatcagtacccattactcgcttattattattctatttcctctctggctctctttccctttctccttgcttttccatattcatggatgcatttcagctctaaggtaacgtgcatcttctgtatcttgtctttttctaaacggcaaaggcagacgtggtggtttctataacgaacgttcagaggtgaaaaatgacaggggattgtatcaaatggattagctctatttttgtacttaaccctgggaagtgtgtatttttaagtagaagctctttcccctagggaaaaaactcactgaatattcagtatagaaagcgattttgttgtagatggactgaatatttctccaagacttgtaacaggatgcagttccccatcatatggaagtcatcgggttggttaaatatgggatgagctgatagctgaagacacatcgtgctgtcaggatgtccactgtggctggtagatgatgacggtcctaatgacagagaatgcccttgcccaatttcaaatggttgctcccattgccaatcatttgcattgcaagactcaacatatgcaacattggggaaagatggctaaattatattccatcatttccatctcctagagagaaaaagagtgtttgtaaatattggaaatgtgataagagctatcagaagtgcattgaaatctgctaaataacataagatacactccccatggattgttttataccaatataaaattcatcaattatttattttatggaaatggaaaataaaaatctaccattatcttatcttacccaaatactgaatttatctgccactgtggataccaagcactcctgagtttcaatagataagtctcagttcctgacttgtcttctattgttgcttaaattgcataaggcatttttaatcttccggttggaaccagcaaggacattagaactcttccctaaatgcttaactttttaacctaacaagtcttttgagggcggagagaaaatgagggattttcagaagcagcattagtagctgctagtttggtactggaatatcctgattgagataaaggatttatttcatattgtcctcaaaacattgactcactttcattcttgttgatactaatggcaaaataattattaaaaccaaaattgggctgacaaaaataacatttgatatagctttttttaaaaaaagattgtctcaattcaaaagtcctccaaaccaaatctgtctaaactgtatacaatatgatattgaattgaaattcttttttagcattgtcggttttctcttctttgtaggtttatttagctaatcattggatataatttacagccctaataacgttactatactgactcgactgtagtgttactagctacacatttataactcagtattagttatagaatattttaactaaaacattccatttgcaatatttatattaatcttatattttgcaattttcgttgctactccgttttcaaacacactacaatccattataaatcaatctttgtactttatcaaacggcagagagtaataaagaaggtcacaactcatagaggagttccttggaggtttgtaacatcatgatttaaatctcagaaagatttaatcaaaagctgaattaatccctgggggaaaagatagtatatagattctattgatggacacaaagcagcctatttctgttcaccggtctctgttagcatgttggggaaaagaaatacagattttctgtgagagggaaaataagattttcttgtaggggaaggatggtaagacataaccttcacgttatgcttcctcccttccactcaaaatggcccatttttattttccacttactggggcgttatctgttctcctagtgcatggagaatgttaaatgtcctccacccccatgtttcccttgttatattccatgtgattccagtaactatgcagagtcccaaaagctccactctagtcaagcatgtggaatgcggggtcacatgggctggtttccaggtctcttctgtcgtaatcaggtgactgcccttgggcgaattctcagcactggggacactggaaacttgtagaagaaatgattatgaaatgtgaatattttgaggaccaggttcgactgaaaagccataacattgtttcatgactaggatgtaggctaaaggcaagaggccaccactttcccacatgtctcttttctgtccataattaattccagaggaatgtgaccatattctgttcagctcaaaacccattacttaccattaggtgacttataaaggggcagagtgaaattaattaattgaaaagagtaagagaacttttagaggagaaaaccaaatgatcctataatattttcatgattaaattaaatgaatgtaattatacatgcacatatgcacaccaaggcattattataatcaaggaccttaaaatattgtatcatttcaaatttatgcatatagcacttactgaaggcaagtagctagtgtgatacttgaatttgcatattgaccattttcatatattttcatatattaatttatagtaggaagaagctgaattattaggaaaaatcctgggatgatttaaaaaaaatattgtgcttctacttgtttttgaacatcaggggcacttagcaacattatctttttttttccacatagttttctgtgatggattttcaacaagatgacatccaagtgaaagccaaaattaaatgggaaggaaagaatgttaagtggtaaaatcctaaatagcttattagactacttaattggagggaatttattttttgctgctgttaggaactctatagtcaagcttctctttaacaatactaattgatgaaaaaaagtggctatagtattatagttaccacaaaatgccctccagcaagtcatttaaggaaattcacaggtactttcctttgatggacgttggtgttgctgaaaatcaagtcctgtcttcattcgtatcatcattgctttctcacttcatttccaagcaggtcccctgcttattcctctcatagcttcacagtgcgcttgaaagactgacttaattcttaaaagaaaattaggacgtgcttgttcttagtttaaccatctactaggttttcggcttgatcactataccctttaatcagatgtatgactaatgtttcatagtgcttagaagtattgccctctgtaagcacttccctatttgttggcaggaatgtgtatacactatcacagaatgatgattaattactctgcttcctagagaagggtaagttagtaaactggtcacacggcatgtgatggagccgtgttactttcatgtcaggcaatttaatgatcaagtgcaatgcatggcgtcattctcctccacttatctgtttacatgggaaaagcatcctggtactgattcaatgagctgccttttccagggtcaacagtctgaattgcagttccgactatccaacaggaaaacaattgaacagaaagcaaagattggagttcaccatccactgtttggcttcagtatttggagggtgggaagtacctatctgttgggctgactttttgccatttccagtggcaggggtggcggcattaaagggagtgccaatgtgtgcacctgatgaatgaaataattcatagacaactcataagagtttctttgtcacttggtgccagagtctcattgagccactgtgtgccatggcatgccatggcaaaaactaagaccaaaaaggtcacctgaaggaaagagaaggaatcaatagaaggttaaccaaacacatttgaacttcaggcacgaagcaaggtttggacagaggtttcccgtggtttcttatttgccttgtatgccaactcattccatgagattatatagacaaaataggcaattgtgcagctaggctgtagaattgtgaagaaaggaatgaacctcacatattggttctatatgtgagggtagttctgtgtcacatagacagccgctggcctttgattaaaatcctgtgtacttcctggctaccacgttaatgggagacccttgaggatttctccacagctaggtttttggatagaacttttaagctttaattttgtggaatgataaaaagataatccctacattcatagaatacaaagagctctttagatttcaataatgcattgaggaggcccccctattttcttctcattgtttgtttcagttctaccatctcaaagtagccatttccagcaaggaaccttcaccaactttcagcattctgaaggttaaactcaagccccctcaaaagtcgtatctgctatatttcatggagacataacttcatggcattgcaataatttaaagacgttatttgcttgtttttgctgtcttaaaaacttagctttatcagctccttttagaaacttgatcaacttggagactccctttcctagaatcagcgcttagtgacacacctggtcatcctgtatcccagccattggacctcaggtaatgatgttgctcaataagacctcttaacatcctcattttaaaattagagaaatcttcctgtactggtaagaaagcaaatatgaaaagctgccctccatttgaaagtccagtgaattcaggatgtgattaaaacagtgaagataatgacaaagatgatgatggtattagctaacatttattgtggatttatcttttagtcattttacttagctgtttacatgaattttcttcattaatcctcctaaacaaactgtaaggtaggtatacaactcttcccattttattgaggaggaaatggagggttaaggtagctggaaaactgcccagatttgggcaaagtccagttggtcctaaaacttatttttgaaagtctcgtcctatatataatgcctccaggaataaaatattaatcttcaaaagaaatctgttagaggtatttaattgttaaaatttgtgtacttttgttgctaccgtctgactgaaaccaaaatctgcttgtattgcattcatcattctatattgatggaacttctccaacgtactagaaactccacatctagttggcagtatagtaagaaaaaattaaaaaatatattttgtaatagcttcggtaggacactctcaccagaatccttattgtgagtatctatatatctatgtatctgtgtatctatctatcttctatcatctatctatctatcatctatttatccatctgtttatctgtctatccacctacctacatatattgcattttgtggaaagtatattgctgtaagaccaatgtctatgagggttgaggccagagatcctcatacttaatgggcaggaatgacctagtgctgtgattccaaggtgtacgatcttacttacaagggctgataaccaactttacaaagaggtagaaacctcttccataagttaaagtggatttggaggtataaaatggtatattcttaccactgagaagttaaatcacaaaaataatcaaattgaagagctttttatggtttttcaagcactattaaaaagtttctgggctgggcgcagcagctcacacttgtaatcccagcactttgggctgaggcgggcagatcacttgaggtcaggagttcgagaccggcctggccaacatggtgaaaccccaactctactaaaaacatatgaaaattagctaggcgtggtggtgtgcacctgtaatcccagctacttgggaggttgaggcaggagaatcacttgaacctgggaggtggaggttgccgtgagcggagattgtgccactgcactccagcctgggtgacagcgcgagactccatctcaaataaataagtaaataaataagttttcaatttagggctaatataagaaaaaaacttaaaaaataatcagtcccgattttgcagccattggtaaaccagtcattttctcagaaaattcgtctgtcttggagaacacaaaccctaggttattttgactaaagttcatagaattctgaaaatgaaagttcatgaccaacttttcttctttcccacttcataatcttaactgacctcatgctcactgagcatggccactggattggagacgggcctctggtattgcagtgtgagaaactgagcccctctttccagagattcttacagtatcctcagacaagcgataggcacgtggagaatccacctttggacgaaatgcttccttgtttctgtgattacattcattgtcatgacacaatgctagctcggatatcagctgttcatgatagaagaccttcttaagatttcttaaatatgtttatttggatttctctctgcaatgctaacctgtctacaatcaaatcttaggattactgtagatactgatcggtagacactcagtgttctaatttatggatcgccctttgagggtagtgtctttgctgcacctggcatcagttgtagggaaaagcgggctcagtttctaacattgcaatacaagaggcccatctccaatccagtggtcatcctcagtcagcatgaggtcagttaagattatgaagtgggaaagaaggaaaggtggtcataaactttcattttcagaattccatgaaccttaatcaaaatagcctagagttcgtgatcttttttttaattatactttaagttttagggtacatgtgcacaatgtgcaggttagttacatatgtatacatgtgacatgctggtgcgctgcacccactaactcgtcatctagcattaggtatatctcccaatgctacccctcccccctccccccaccccacaacagtccccagagtgtgatgttccccttcctgtgtccatgtgttcccattgttcaattcccacctatgagtgagaatatgcggtgtttggttttttgttcttgcgatagtttactgagaatgatgatttccaatttcatccatgtccctacaaaggacatgaactcatcattttttatggctgcatagtattccatggtgtatatgtgccacattttcttaatccagtctatcattgttggacatttgggttggttccaagtctttgctattgtgaatagtgctgcaataaacgtatgtgtgcatgtgtctttacagcagcatgatttatagtcctttgggtatatacccagtaatgggatggctgggtcaaatggtatttccagttctagatccctgaggaatcgccacactgacttccacaatggttgaactagtttacagtcccaccaacagtgtaaaagtgttcctatttctccacatcccctccagcacctgttgtttcctgactttttaatgatctccattctaactggtgtgagatgatatctcattgtggttttgatttgcatttctctgatggccagtgatggtgagcattttttcatgtgttttttggctgcataaatgtcttcttttgagaaatgtctgttcatgtccttcgcccactttttgatggggttgtttgtttttttcttgtaaatttgtttgagttcattgtagattctggatattagccctttgtcagatgagtaggttgcgaaaattttctccaattttgtgggttgcctgttcactctgatggtagtttcttttgctgtgcagaagctctttagtttacttagatcccatttgtcaattttgtcttttgttgccattgcttttggtgttttagacatgaagtccttgcccatgcctatgtcctgaatggtaatgcctaggttttcttctagggtttttatggttttaggtctaatgtttaagtctttaatccatcttgaattgatttttgtataaggtgtaaggaagggatccagtttcagctttctacatatggctagccagttttcccagcaccatttattaaatagggaatcctttccccattgcttgtttttctcaggtttgtcaaagatcagatgatagttgtagatatgcatatgcagcattatttctgagggctctgttctgttccattgatctatatctctgttttggtaccagtaccatgctgttttggttactgtagccttgtagtatagtttgaagtcaggtagcgtgatgcctccagagtttgtgatcttaagacagaagaattttttgagaaatgactggtttgccaatggctgcgaaacagggactgattctttttttaagtgtttctaacttttaattagaaatcatttcaaataaacatgaaagtgcataaaataatagaattgagccccatgtatctcatacccagctttatgagatgttaatattttattcaatatgcttaagattgcacttaaatcacatacctatccctttattctcctttcttcctcagtagcattctctccccaatagttagtatgtgttatgcctactcactttttctctttaactacatttccgtatatccacaaatgagatgcagtattattttgtatcttttgacaatttacatgtttttctactataagtgttcttgtacaatttggcagtagtgcctttcaatgcaaatgcaactagagcaattgagccttggtgtaagccagaaggaaatccttctttccaggggtttggagttgccttaacagctgctcaaagtgtcccagctactcattctttgctgcattcctgacatgcgtcttggtttcctatttatcactttggctcatgcttaagtgcatttatgcaatagctttaaaagtcttcgacccttgatccacacccttctcttgcttattgagtggttgtaaagttgatccaagggaactggaggtcataaaatcacagcagaaaatggaaactcatacctagttattaagagaatgggttcttggatttttcttttttaagtaagaaattttgctacactcctcaccttcccactcccacatacctctgcatggccgggccctgtctagaaaggacactgggaggccccaggactatagaatttatttcttgtaatagtaaccaattaaactagttaccagttggagagcatgttccagcacttaagttaattgaactgttgcaaacgaaatatgattctaaattgtttcagtattccaaatcacttcatgcgtgtagataaaaatgaaaaaaattaccaaattggtttggaatgtgcaaatcaagcatacagtgcgaacatttagatctatgaactgataactgcagtaggtaccttgaaaaactttgtgggcttttttttcttcttcttttgctgagctctcctttgaattcccagaaccactacttgatgtgatagtcaatgaatggaagtcaggtgcaatcagaaggggaactgtctgcatcaggatttttctaccaatttgcccagaaaataatctcttcattattcatttcatgggccaggtaagaagggaattgttgaaaggagatttagcttaatggatgaactgtagtattttattccgggagaatctggctagaatttggtttatgagtccggagggtatagttctccttggggtggtgacccttctgtacctagggccactgcacataaacaatgagtgtctaaattcaagaaggagatggtttcgaggaaaatctcatggcaaatgttgctactttcctgtctccacagtctctcactcttcatgtctcccccatcacccaacatatatgtggatgacagtctgtttccatagctttgtattgctgtgaattttccaaccctctacatagatcaggtcaagggctggaattgaaggggttgtttgagaagtttggatgggctgtgaggctcttggcagcttaatgagtcatcttgagtaacaagtcacacaaaatccatgacaattctcacctctcttcaaggttattccttcccctcccaaaggaaacctaagaaaaagcagtgaaatacatcagttgatttcatgagctctttttgagcggataaaataatttgagttagaatacaggctgccattgttgttgcagttacagttcaagttgcctggcaccatacaacattggaacataaaccactgacaaaaacaaactcatgcagaataaaccgactcgacacaaagagcagagatattaatggaccagtcaggtgcgtgaccaaaaggaaggcttggtcctattacagtttaggcagctgtatccatagtatgagttgaaagattcagagttgatatttttctccaaaatatattctccatggcttacaaataataccggaaacccaacattttttaattcatgtatttttaaattaagaaagacaataaactgtagccatcatcagttctagcaaatcctcacctagatcattttaagaggagagctaaggctgggcttggtggcccacgcctgtaatcccaacactttgggaggctgaggcggatggatcacgaggtcaggagatcgagaccaccctggctaacatggtgaaaccctgtctttactaaaagtacaaaaaataaataaaaaattagccgagcgtggtgacacgtgcctgtagtcccagctactcgggaggctgaggcaggagaatcgcttgaacctcctagggaggcggaggttgcagtgagctgagatcgcaccactgcactcctgcctggacagagacagactccgtctcaaaaaaaaaaaaaaaaaaaaaaaaaaaagctagttgcattaggacagaagtgagagaaataaggttatccaagacctcactgcctggagaaaggcaggaagaagtgacactaggtgctcagagaaaggacaaatagtgagtgtgccatcaatttcactatcatgtggaaatttcagtgggctccttgttcattaaacgtttattgaacattcactttgagccctgtgccaggcatagaaaggataaataatgttcttcctgccttcaagaaacttctaatcaattgtggagacatagatagtattcaacaaactttaaaaagctcacctactgtatcccagacattgttttagtcaccaatgtggtagaaatgaattaataagagaccctgtcctcaagcaatttgcagtctggtggatgtacataaggtaattagtgtataactaataaatgtctcaagatctgtgggaaaaaaaaatttactaaggagggaggaagttcagtgaaggctctaagggatctatatggcctgagctggcccctgacatgtagaattaggcaatgggacgagcagaaatagtacaactctctcttttcctggatctctcctggagttgagagtatccaagtttttgctaatctacccgcttataaacacttacattgttcaattacttagtccaagtgtttgctcaataaaaactttcctgacccatctctcctcactccctgtccccagacttgtagaactcactcctttattgtctctcctgcacattaacctatcacagcactgataatagtatattctaaattatttctttacctttactttgccctttgagtttgtaaggatgctggctgactgctgggatggatgaataaagatggatagaattttcatgtttacctaaacaaatccccaaatgtcctggctctgaatcacttctagaatattcttctcaagctcctataaaatggcaatttatgctttttgagatgggaaaatgatccctgaagccttctctgaagaactgaatgtaaggaatacttgtgtggtggcgtttcccctctcatgtctcattcacagaacactccaaaacataaccattttgctatgacagaaacatgatttcttcatttgcaggcagccatgatgagcttgctcctcctggaccatacaaaacatacgctgtctttccctagcttttggaggtttccccacacaggatagctctggggaggttgttttctgcttgtcttgtttctaagcatcttttgctcatctttcctagccgcacggttctaatttctgattgcctggattatatatcaactaggccaagtttttgattccttagtcacatgggaagttgggtcaggaaggcgggggctgcaaaggactcgggcatagagccagctttcccaggagttggccatgatcgtactgattctgcgtattgttttaagggtacacccctggggggtctagagatttctgctgatcctagggacttagagaagctcaaaacctagcgcaaaagactcatctgagctcaaatggatgaagcctggggatatttgctcatgccttccaaatatctgtctaaaaacgtctcatttctgctatttctatggccaaatgaattgtcacatccatgtgcataccttacccaacaatctgtttatcaagaaagaggagcctgttgtctcccaatttctgctttccaggcgactgatattaattactttgcagcaggaacagtttatctctggctgaaaccaaagcagatgaaaatgctgccgtgctgtaagatttatttatttatttttcttgaaacgatgaatgggatgaagatacttatctgagagaacaggtttcaggtggagcctccgtcagcagtactttgaaatgtattgttagaatatggctgatctgggtaaggaataaaaatagcgtgtcatagtgtgactacattaactcatttccaacacaggaagctgaggcccctgcacaatgatagacttgtcctgaaagtagaaagcacgacccccattaatgacgatggacctagttctcaattactggcattacttaaaagataccgctaatctcagcattttgggaggctgaggtgggtggatcacctgaggtcaggagttcgagaccagcctggccactatagtgaaaccccatttctactaaaaatacaaaaattagccaggtgtggtgacttgcgcctgtagtcccagctactcgggaggctgaggcaggagaatcttttttttttttttttttttttttttttttttttttttttgagatggagtctcgctctgttgcccaggctggaaagtagtggcacaatctcggctcactgcaagctctgcctcccaggttcacgccattctcctgcctcagcctcccgagtagctgggactacaggcacccaccaccaagcctggctaatttttttgtatttttgttttttttttttttagtagagacggggtttcactgtgttagccaggatggtctcgatctcctgacttcgtgatccacccgcctcggcctcccaaaggagaatctcttgaacctgggaggcggaagttgcagtgagctgagatcaggcctctgcactccagcctgggtgacagagcaagactccgtctcaaaacaaacaaacaaacaaaaagatattgctaattgccccaaagctatggccctgctttagacctaatctaagtaccctagtacagagaacaaagttttaaaatcaacctatcccccttcaaattattaagattctacccccaaatgatttcttctgggtagtttgcatgtagattcagcactgaatccccaagaggttgactgagaaataattaggacaacctgacaatgaaataatggtctaccctagttatgggactctagggcatttatttctttacatgtcttagcctcggtttcctcaatagaaaataggaaaagaaagccaacttggtggggttcatctgacccatttttttaggttaatctatctaaaaggacctggcaaacaatggtcatgctccgttttcataattagtggccaagaagataaatgtctttgaaaaaatggaaactagtgataaaatttggggtcaaaggatacatttggttgggtgtggggctcatgcctgtaataccagcactgtgggaggctgaggtgggaatgatgacttgaagccaggagtttaagactagcctgggcaacatagcaagactctaaccctacaaaaaatacaaacatttgctgagtatgatggtacatgcctgcattcctggctagttgggatgctgaagcaggaggatcccttgagctgtggagatcgagttcacagtgaaccatgattatgagacttcactccagccttggcaacatagcaagactctgtctctaaaataataaaacaattaaaaataatgcatttttaaaaaatcaattttattttacttcccatacactgttctagacagtgaggctaagggaaataaaaacaacacaaagactctggccaaggttggaaccagaagctctgggttctagttctggctttaatgttaaccagctgcaattactttgccaatgtgctttatctctccaggatccatcggctacatctgtaaagtaaagagccagacaatttccaattctgacattctatgcaaatgaaaaaatgtactttgtgcatcaacctctcgtcttttcctggccactctagccactcctttatgttctccttcattaactactattcttctacttgaatctttcatgcaaatattcccttagttgttttctttaatcatatttcttttctttgtccatgttttccttgagatgtatcattgactgcagtaacattgacttccctaagaccatgggaaatgactctaaatctatttccccaactgaaatcactctcccaagcttttgactcactaactactggacacctccttttgagttttctcccaaagtttaaacatagtatgtctcaaactgaacccattatcttattcacaaccaaaatctacttatattcttccattttcagagattgtcatcaactcaaatttccctggcccaaagcttaggagtcacacaagccctccctgccattcacaatcacatctaattgattaccaagtcttgtttattttacttctttcaaagccctcaaatcaatcatctttcatctgcatttttccatttacaaccaatttcactatatcttccactttgcagtcaaaacattgcttctaaaatgctaacattctatcctatctatcttatctagagcctaccaacagtttcacctggtttcctggaatcaaacataaagtctctagcatcaagtataagtttatccctgaatgatccccaccctctcattcaaaagttattttcaccacgctctcagccccacagctccactcctactgcaatttttgcgttttgtggaatagactctattatatttctaaaattttgtaaaagctgttctctctgcttggaatgccctacctttctttctctatctgagaggctatgggagttttttccagggtggctaagagcctatgctttggggtaagacatacccgtgatcaaagtccagatctagtatttataagctatgtgatagtaggcaggttgtttatcatctaaattttagtagtattacttttaaaatgcaaataacaatacctgctacataatgtcattgtaaagattaaatatgaggtgtttaatgtgatgccagggacataggaacatcaataattggcaactcatgtttgtcctctacagctagactctatgatcctcctctcttctcctaaccacacctctcatgttctgctctggaatttacattacaggatgccagagacagagtctattttgttcacatttatttagcacttgtcattgtctgacccaagcaggcctaccatagaatttctgtttccatcaagattcaactaagtcactatttcttctaggaagtttttattgaacccctaatcttgcttcagcattggttaattacttaagtaataggctctgtttatacacagttggaattctttctctttcttcagtagagtcttgagtttctggagggcaaagaccgcaccatttacacctttgaatccccaacacttttctcagctccatagagtaacactaaaaaaagcctgtatgaatgcatgagtgaaggaaggaatggctggatgagtgatgaatgagtggattctctctttacctctgtttctttcttttcctcttttccccctcttactatgctccatttaaattctgtttctaagaatcaggtagagaatgtggaaactaatggatatcaggcaggtgaggacacaccttcacccagaggagacatgtagactgccccctggtgctctgctgaaattgtattgatagtggcacctgggaaggaaaggtcctttgatcacaggagctttagacaagctttcccctgagcaagggcatgagaacagcacagacaagctgctggagaattttgcaggccttcctgaaaggagtctgaaaagctggtatgtaggtcagtgtccaccctgggactcagcccacggaggtaaaaataagagcctggaaggactgagtttccagatgcccaggtgagagtggctggggggagatgttctgaaaaggaggaggaaaatctctttaatttgttctctgggacatggcctccaaaccaccttgtaggcaaggcacaaagccgagatgaccctgatatgcatcgaaatgaaaaggtttgtgtgcaaatcagggaagaatcctttctgcacctacaggatggatgccagggagttaacatttggaaatctcagctcagtgccaggacgttgtttgaaaaggagatcttggagcaaatgccagtgaggtacagaggagaagaagtgaggacaaggactccaggaattagctattcaagaatgttccagaaacctgatagctgttttccctgtcaaaaagagagagagagagacaggaaaaaaaaaaaaaaaaggacattcaaacgagcattcatcgaagcaggctgctcagggttttcaagggaattgggagggcagatgctacaaggttattggagtcagtgtcaaatgcgagaacaaagtggcagtgacatgagctaagaaatgactaagcacccgagccctggagtagtaatagatggatccaaatgccaagtgaagcagttgtcttaactcatttgaatacttctgaagaggtgatgaaaaaatagcaggagggatggaacctcttctgttccggaatatcccaagatgataagagaatgttgcataatgttactctgtgatttgcttgatccacccttccctatggctgctttctctttagttttaaaatgaaagttttaggtccagcgcacatagggtttccatttgatataggggctgctgttcctaggatttgattcctacttgcagtgtgggactctccctctccccatgaaggggtgctcagagttttaagaaaagagcatggtttggcattcaagcaggtaagtttttggcttacatagaacttcctctttcttcctctcttgtttttccttttctcatcgctatttatttccatatattgaaaaacctgaataatttggacctaagggatatagtgaagtgagcagagaaaagttaaggaggcaaaattcatatatacaaattgtattgtctcacatggagtgtttgtatatgaagagtaattgagtagatatttagcatatattagatgctttataaatactcctatccctgctgctcccgctccttttcagttccctctttcatttctgctttagtaagataaagattactttgaaaagaattattgtcaatgatagccaccatttactgaatgcctcttctgcagcagactctacattagaatatttgtgacatcagttatgccttatcacaattcagaatgggagcagcaactgtccccactttacagatgaggaaatggagctaacacacagtaagtcacttgctactgctgctaaaaagtgagagagctggaatgcaaatttaggtgttctgcactctaaacccacgttttgctttgtttttgtttttttaatgctgctgcatttctctcatggatcatgcaaatgtagcttcttggagcaaatacatagcattccttcagaactggggccagggctgtttaagttggtgaattacatcttggggtggccatcccttacctttggcattctccttcccactccctctgttcaaacagcaacaaatcatgctgcccttttagtcaagcacccttttattctttcctgaaactgtgtctcaccagccctatccctgtcctttaggggtccagggtcttaattagctaattaaataaacttatcttgcctaatagctcttaattccaaagtcagtgcctttccttaggtactaaatacagagtcaaatagagaaatttcagttggtaaaggttgctgagaaagataaatttttgaagtagacaaaactttattgcctcccaaacctcagagaagcagtcacttattctatccacatgtttttggcatttccttgcttacaaaaccccacagaaaaactgggtattgagatctaagcctctaattgtcttaataagtttcagttagaaatgactttccataatttgttaaatatttcctgagcacctcctatgtgctaagctctgttctaggtaagacattcagagggaagcaactcaagcacctggagatggcctatgctacaggttgagtatcccttctccaaaatgcttgggaccagaagtgctttgaattgtccatttggggggctttaggatatttgtattacacttgctgcttaagtgtccctaatctgaaaacctgaaatccaaaatgctccaatgagcatttcctttgggcatcatgtcagccctcaaaaagttttggattttagagcatttgggatttcagatattcaaattcgggatgctaaacctgtaccaaaaattttccctctatctatcgtcctctgtcattagagaattttatagcttgttgaccacttaggaagatacccttgaaaagaccaagtatgtgactagggagaaaaaaatattaaggaaaaaaaaaagagaaatattagtttgaaactgctcatttaaaattactagtttcaatcaatgacaattttaagatattaaatacattctggagtaacttgtcaaaaaataaaaaggtgccattactgatattctccaaggtttttctaataagatcagggtcagtgatgggaaataagctggaagatgaatagagtgtcagaatgcaattgagttctaagcagttacagcaagttccccagtaaacacagcttgagcaagtttgttcctgatgatggttagggaggcctttggtgaaaatgacccagagaacagctgctttctcaccgcacaaaatactgctggaccttccttacttaacctattggaaagcttccattggcattctcttgtgagttaaggcagaggaggaggtagcctcatgaacctctctgctcctctgattctgcgctcattttgattttgttaagagacttcattatattctttccatggcccaagtggaaccaaatccaagctccatctactagctgtgtttctttgggcaaatttgtaactcctctaagcctcagtttcttcatctgtaaaatggagataatagtaatatggctaacaataacagcaagcattgataaaatgattatttctctgttgaggcactctatgttggagatacctcatctcattggatgctcacagtccccacaaggtaagtgtgattacacctacaaatagctatttttatcaagaatcatggttgcagttcagaaattactagaggtgacgtttaaaaaacatcatggttatcttttttaaagtacaaatgactgtgtgacttctatgataataatcattgccagagaggagttttcattatttaataagtggaatgctttggaagggcttcttcatgtaaatagatattgctaccttcaactcctactgagtcctctcatggtagtaggttataagacatttagtgggctgaaaatatatattacctggtaaacaagtgtgtagagcacttatgtgtgatactgattccttgtcaaactcagagagacagagaaagaaagaaagagagaacagagggaaagagacaaagatggaaacaaagagaaagagacagagatagaaacaaagagagagagaataatttcatatgcctcatttggcacttgaaaatgaagcaggaaaccatggtgtccccacctgggaccccgattctgtgacctgctttctgatatggtctggaaattcttaacccagtggaacccagggacacaggtgtttcatcttcagcagggtcctgtcggggcctctctacccgaggcctcagtcctacacagagtacattctccttgaaggaggaaaggaagactccctccagctgggctgtcacagaactgctatctcttctctccatccctgctggcctccagtcttttctctgtttcactcttgttatgggagctgtgagaaaagaaaaatcaattctctagctaaggtcagccagtaaaatttgctcctaggtcccctaaccacggcctgatgaatccagccacatttctcccaggttacaattcaataaagcctcctaatggcctttatcatgatttccctccacacaggctcacagcagcgcctttcatgctcccttataaacctccttgtagggcaataattttgtcttttagtttttctggatcattttggaggtgaattgggccagggtgccggggtgagggtgagggctgaaaaaacaaaacttttagccgcatctggttattccatttagttttcgcggcaaattattatagcataaaagtagcttcagatggtgctgactgaggatggcttggcagggttactccctgggctttacctggtccctgagtagttatgcagcatcttttaaatcattcgttcatttatgctaggccaagtgtgagaaatattttatgagcacctaccatgtgctagagaatgaagctgtggagaagaaagagtcccggattgttgctcccaatccaagttggagagacagaccagtaagtaagtcagtgaggacattagaataaaagcatcacagagcccttaactgcttttcaagtggcaagagaagcccccgttttcctccataggggcagagagcatcagagaaaatctttctcggcatagctgccatgaactgaatcttgaatgtcaaggaagaagcagaagtagtgggcttgcacatatgctaaaattccatatctgccatgtgttagccatgttaccctggacctattactgatcctcttaaaatgcaggttcctgagccccaaaataggtcagccttgcttgcagagtttttgtgaaagttaacaaaatataggtaagtgctagacttatatccttatatccaacacaaagtagatactcaagagatgaaattctatttttgttattattatgtataataatttttatttattaagagtttatcaagtataaactcaataataattagaacttgagcacgatccattgaagaaatgaaaagctttcagtttcacggatatttgcaatgggtgtagaggggaagggtaggaaatctggagcggagacatgtggatggttatgcaggagccagttcattgagagccttcagtacaaggcttaatgcagtacaaggctgtcataaactggctcctgcattaagaagtagggattcattgaaggttaaccactttttaggaaggggggtgtgtaagtaattagatatccagatgatgatgtggcccttattgccagctatctgatcccagctcataaagccttggttcactgaccacctagacatggaaaataaaaacccaggcaccactttgcctctgaagaattctcagcaatttttcagaaagtaaaacatcctctgtgaaattcttgaagatttctccccctcactctgaaatgccctgaatttcaagcagctataatgttgctgactcatttctagtttcataaggatctgggttgacttgtcatgttataaatctccagtttatggaatcgctcctactgctgtaaggtagacttggaagtgtgtcaaagggattcaaggtgggcaaaacagaagttgagcttcagtctcattattttgcttattttttcagtgaagggagacctttgatgattttttacaggggccattatttaattttcatcttaaggaaaaaatgtcaagcagtcgactttaaagatatatgtctatgtaagactgattgtatttaaaacaaatttcccagagcttcctttaatctattatagaatctttctatatcattcatggcaaaagtatgtcaggcctttgatgggaagcaaattttctctttttaggattttggtgtgactttgtctattgtggacagggacatctagccactttaagaaactgaacactcaagcctatgggttacaaagaaaatgcaaaggtatggaaatgtgcagtaacagaaaaaaaggctggactgaagacaaatatggcttatgttacaattttgttttggtttgtcttttcctaagattcagctatattggcaaagcctacagaataaacaccacaggacttgaatataagtttgcaagcaatcatgtatcagggcaactctttgctatggagagtaaacttgtttatgtctttgcatgagttcctcactccttccagaatacacagatggatggatggatggatggatgatggattgtcaagaacagtagcccttacctgaaaacataactccttcactcagtgttatatatatatatatttagctttcaaaaagatgtaatctcagctgggcacggtggctaacgtctgtaatcccagcactttgggaggctgaggcgggcggatcaactgaggtcaggagtttgagcctagcctaaccaacatggagaaaccctgtctctactaaaaatacaaaattagcctggcgtggtggcacacacctgtaatcccagctactcgggaggctgaggcaggagagtcacttgaaccggggaggcggaggttgccgtgagctgagatcgcgccgttgcactccagcctgggcaacaagagcaaaactccgtctcgaaagaaaaaaaaaaaggaaaaaaagaaagaaagatataatctctgaatgcactaattattgttactaatttctttgaggttattttgtattgttttgttttgcttttctgctacaccttgctttactcccttctctttctgggtttaatcctccttggactaaagccaaggtcagagagagtaatatgcagtgcaacagcctgcctagtaaaacatatctctttattaggaaattgagcttctaccttttaccaagctgtggtttcttataagaagaaacgctgactcataatacaggcaaggtgatgtgtacatgcaaatacacaattttatcttttaggctgatttcattaaacaacagatctgtggtatctgagaagctgtcaaatactcaggcttgattttacataattatacaatatagaatgacattagctctgtattttcttattgttgtatcatctctctccctccctggaaatgtaagctccatggggggcgagagttttgaggtttttgttaactaattataccatcatctagaacggtgcctaacactaatagaaactcattaattatgtgaataaatgagtaacttagtgcaaagtcaccatactctcctttatttgtttccagtttttgcttcatgcaggcttttggtacctcccttggggagggttcacagcatcacctacaatgagagaatttagggttatttttcaagttcatgtcattataacatggggagctgggatttctgtgctcattctttctccgtgacatcagctgattttaagtcaacctttctatattttttacactctctctttttacttctggcttggctttaattagaagcccattttttcttagttttttttttatgtacatacgtttatttccaaaatgttattaaacttaattttatgctttattttgttccccacaaactatattacattttctttgtaccttctcatttgctcttctcctatgtaattctttcctttcaagtcaccaaacagcaatttgtctgagtttcctgataacatctctctttattttggtatcttctgaggtatattttagccctttttaaatatagcctagataaaataagtacatttaatgtacttggcaagaaagtgttaagcattaactcctaataattcactccttattagtctcctttcaggtaagttgccagacagatttcaagtgataagtggaaggtcactcaaacaaagatccattttcctggataggggaggggcagagtttcaaaagtcacatgtagaagcaaattccttctaatgacagctgtagtttctccaaaatgatagataaataaccttttgtgtagggtgagtagagtcatctttttatacataacagtaagaatagttttgaccaagtttcagtgttcagctataaagacaaagggacagagataaaagcaattaattatcaatataaaggacattgatggtttgctggctatggtaatgagtacaagtatcataactatgaggctttgaataaattcaatgagattctgtgtgtcttcttgagtaggtagtcttgaaatggcaaagtcaattaggactgaagggaaataagagggtagaaaacaagactaaaacactcagtaccttgtaccctaacacccgctgcaacaacaaaaagaaagatattatcaattcccggatcagcatggatttgtgtttgaatcatgaaccatacctgtacaatgtgtgtaagtaattgttaaaaaatacagttatgtggccagaggcggtagctcacgcctgtaatcccagcactttgggaagccgagggggttggatcacgaggtcaggagatcaagaccatcctggctaaaatggtgaaacccccctctccactaaaaaaacaaaaaaaaaacccaaaaaattagccgagcgtggtggcaggcacctgtagtcccagctactcaggaggctgaggcaggagaatggcgtgaacccgggaggtggaagttgcagtgagctgagatcgcaccactgcactccagcctgggcgacagagcaagactctgtctcaaaaaaaaaaaaaaaaaaaatacagttatgttttacatcatataccaactccaactgattggtagtggctgcctagaactttttgcattaggaaggattctcgagtattcagtggtatctgtgagaaataatgctataattatcagcaatgtcttgtgggcatcgtacttgcaagtgctagcattaagtgctatgatttttttgtttattcatgtctaattattacttcatagttaatttcattttattctgttttttgctgttgttgttgtttctaaatctggtattataaaatttacttctgggaagattgatgtatcatgatagccatctggcccttgtattgttgtttgcccagttgggactattgcaaaactgcaccctgacagatttcacggcagatagcgtatatcccacatggactgtgaagaaacaagagactttgacctaagaaaagaataagatattcagtgcaaaattcactgttgattttaccagagcagtgatactaaagacttcaactacattacaaagactctgttaaggatgctttcaacagcaaacaacagcaaacccagttcacagtggtttaaagcaatatgaataactgtttatcatatcacagaaatcaggagatagattgattattgctgatgtgttcagtagtgtaatagtgtcaggatttgcaactcttcaactctcttggggtttttctcatggttatcagagggatgccacatcaccaagtttcatgtccacttttatgtaatgaaaaatggggtaaggtaaagaaccagtggcatccccttttgtcagtaaagtaaagtaaaactttcacatatgacctctgacctttatatgttcttatttagaagcatgtcatatggctaacaccggttgcagaagcagctgggaaaatatatatttacctttactgccctctgtggtggatgagacaaggaggaagggtattaccaatagtctctgttacggtgtacctcttagcctagtggctatccatacatatccttcttcctatagatatgttttaacagaggctattcatctttattccatggaaaataaccacacataatagtatttattttaggatctagctttaagtgcagtattgctcactatcagatccagatgtggatgttctggtctagtgactaatagctaaaaaacaagttatctgttccctttatcctgcataaagtgttggtgagccggccaggtgcagtggctcacgcctgtaatcccagcactttgggaggctgagacaggtggatcacctgaggtgaggagtttgagaccagcctggccaacatgaagaaaacccgtctctactaaaaatacaaaaattagctgggcatggtggcacacacctataatcccagctactgtggaggctgaagcagcagaatcgcttgaacctgggaggcagaagttgcagtgagctgagatcgcaccactgcactccagcctgggcgacagaatgagacgagatcccatctcaaaaaaaaaaaaaaaaaaaaaaatttgtgagggaacaggatacctacaatgaaatctccatcttgggaaaaggaacaacgggaattacttacaaattactggcctataacacacacattaaacagcaaagacttagccctggcagtggagtaaattcctttattagacaatctgcccatccctgtcttttctaggaggatccctagaatctgggaggattagggagataaatatgctaattatgcagatggccacacctgaagtaagcttggagaagatgctcttctgaggaacgtacaactttcctagtttatttcttattcacataggttcaagggcttagggggttaacagtcaaagtctgggtttcttgagcaacatcatcccctcaaaaatatagtaattctgggagtcattttgcttctgataatttccacatgggataattaagagccagtacatgtgtaggcatagtctctaattgtgagacgtgctgtatcctagtgcctaagtttagggattagtctaatggacaacaccttgtggagatatgaaaaatataggcttgtattggaagacattattggagaaattctttgttaaggagcagatgttaaatattggaatgtttttacacttcatggtaggtagctgcttacccaaactagcaatctgtaccctaagatctcactactaaaggtttaatgcttgtcaaagtttaggggccttcaaggatccatctccagccttgttgccaacattcatttgattcttcattgcctccaccttaccaggtattaataaatatgaaatatttcatatatcaactctggcttatactcagggcagcagagaagtatgttccttagtatgggggatcctgggacaaaggcaaacattttccgagaaaatgtcacattaggaaaatgctaatcaaagccttaaaaaggacaacatcaagttgtaaatgccacttacttataagaaagttataaaaaataaagagaaggttaaaaaatagattggttaggccgggcgcggtggctcactcctgtaatcttagcactttaggaggccgaggcaggtggatcatgaggtcaggagatcgagaccaccctggctaacacggcgaaaccctgtctctactaaaaaatacaaaaaaagtagctgggcgtggtggcgggtgcctgtaatcccagctactgaggaggctgaggcaggagaatggcatgaaccagggaggcggagcttgcagtgagccgacatagcgccaccgcactccagcctgggcgatagagcaagactccatctcaaaaaaaaaaaaaaaaaaaaaaaaaaaatagattggttagagacaaagtatgaattggtagaaagtggattcaggagataattatgctaatgtggactaatcactgtggcattcctctcctgtgtgtcttggcacagtgctctgaccaggggcaggcccttaagccattgacccatcttctatacaagccagacaaggaaaggtgagaagcagaagcccatttaatcaagtaccaccagtgtaggcgggcaagggaccaacgactagaaggtcagcaaaagcaaggggggagcaaaaaggtgccacgggcctcagaacacaggcagggtccagagttgaagaggttagaaagttggcagaaacaactctagtaataaggcttgaactttgatcctagggcagaaagtgctccattgtactctattactacctgctgaatgccaatgagttagttaggaccacagatgctgggcactgtcagaaagtctcaaagcctttttatcattaaggccaagacagagatatcagcaagaacttttccggattttactagcacactgttttttaatttttaatttttatccatttattgtcatatttttgagaatatgacattatgattattaacaatagctgagattgttggagggagtgcttacaatatgccagacacagtttttagtgcactacatataataagtatctcatttaactttcataataatatgagggttttttttttgttttaatcatcctcacttcatagagaggatacaagtttccatcctcttcctttacattctttgtacaaactgtacagtttattaaccccatattagtcagggttctctagagggacagaactaacaggatagatgcatatagaaaggggagtgtattaaggagtactgactcacatgatcacaaggtgaagtcccacaataggctgtctgcaagcggaggagcaaggaaccagtctgagtcccaaaacctcaaaagtagacaagctgacagtgcagccttcaatctgtggctgaaggcctgataaccccttgttaaccaccagtaagtccaagactccaaaagctgaagaacttggagtctgatgttcgagggcaggaagcatccagcaaaggagaaaagatgaagcctggaaaactccgcaagtcaagtccttccactttcttctgcctgctttattctagccacactggcagctgattagatggtgcccacccagattaagggtgggtctgcctctccaagtccactgaatcaaatgttaatctcctttggcaacaccatctcagacacacccaagtacaatactttgtgtccttcagtctaatcaagttgacgctcaatattagccatcacaaatccaccccttgtcaacttcaacccatacacacttcctgaaataatacataatcttcaaataaaaacaataataaggtcataattatgcctaacattatacagctttcctttgtacaactggaagtgcactaatccttaacctaagtgctattacataaagttaacaacacttaaacgttgatatgaagtcaataaatcttatgtcacatgataaaggcaaaagaaaggaaataaaatgaagacttttcttaatataattgtatacgtgcacgaataagttcttaacaaaataaagaggaaatactcatgacaattacattcctcgtttctgcaactggtcatgtggtcatagctggtattgatgactaccttctactacccattctgtagtcatagctggtattgatgattaccttcttctactacccttcttctacccatttcctttgccttcagcaaacacctcagcaggtcgtggttttttacctggtggagtgacccaaacctttattcccaaagagtctgggccatttgtaatcctgcctggattgggttgttgtaggttttcattgatcttaattacagggcatggtaatactaagagacaccctaggggatctcctgtattctacacatactcttccttacctccattgtggagtagtagactgcttttatcttgataatctgggtcaatcaccccaaccagcactgtaactcccttcttggccattgacttagaggtaggaggagcccaaagtggccagtggcaatcttaacttccagtttaatggaatcattgttgtgtctcctggtggcagcattcctctttctagaactaagacctctaggcctgcagaacctaatgtcgcaggaagaggaagcaaaatttttgctaatgggtcataggggtgatggtgagtggtgccacttccacttccaccccatgattctggacccatgaatccaggttatgggacaaacggtaccatatattggatgctgattcagagaatacacagccttctggagaactttgccccagccctgcaaagtattgtcacctagttgatgttgtaattgtgacttcaatgggccattccacagttccatcaatccagctgcttcaggatgatggggaacatggtaaaactagtgaatttcatgagaatgagcctactgccacactactttagctataacctgagtgccttggtcagaggcaatgctgtgtggaattccatgatggtagataaggcattctttgagtccatggatggtagtcttggcagaagcattgcatgtaggataggcaaacccatattcacagtaagtgtctattccagtgaggataaaccactgtcctttccatgatggaagaggtccaatataatcaacctgcccccaagtagctgtctgatcaccgcaaggaatggtgccatatcgagggctcagtgttggtctctgctgctggcaaattgggcactcagcagtggctgtagccaggtcagccttggtgagtaaaagtccatgttgctgaccacatgcataacctccattcctgctaccatggtcactttgttcatgggcctatttggaatgataggggtggctggggaaagaggctgagtggtgtccacagaacaagtcatcctatccacttgattattaaaatcctcctctactaaggtcacccattggtgaatattcacatgggatacaaatgtcttcccagtttttgaccactcagagaggtcaattcacatacctcttccccaaatttctttgtcaccagttatccaactatgcttcttccaagtccctgaccacccagccaaaccattggctacagctcatgaattagtatataattgcacatctggccatttctccttccatgaaaagtgcacaaccagttacactgctcaaagttctgcccagtgggaagatttccctttgacacagtcctccagaccccagaatggtagatccactgatagcttgcaccgtgtacctggaaaagtcacagacactcaacatcagcccttgaaggcaaccaggatgggggctgtgccacaggggaggagctgcccaaggctgtgggaacccacctcttgcatcagcatgacctggatgtgagacatggagtcaaaggagataattttggtgctttaagatttgattgccctgctggatttgggactttcatggagtgtgtagccccttcattttggtcaaattctcctgtttggaagagttgtatttaccaaatgactgtacccccattgtatctaagaagtaactaacttacttttgattttataggctcataggcagaagtgacttgccttatctcagatgagactttgaactgtggacttttgagttaatgctgaaatgagttaagactttgggggaccattggaaaggcatgattatgttttgaaatgtgaggacatgagatttgggaggggccaggggcagaataatatggtatggctgtgtcctcatccaaatctcatctcaaattttagctcccataatccccaagtgtcatgggagggaccctgtgggaggtcattgaatcatgggaatgcgtttccccgtgctgttctcatggtagtgaataagtctcatgacatctgatggtttttaaagggcagttcccctgaacatgctctcttgcctgctgccatgtaaaacgtgcgtttgctcctccttcatcctccaccatgattgtaaaacatcctcagcaatgtggaactgtgagtccattaaacctcttttctatataaattacccagtctcagccatttctttatagcagtatgaaaatagactaatacactctttttctgactcactgtcatccatccatccatgcatccatccatccattcactgatttaattaactaatttaacacattgatatgcacatttttatgctaggtgctgggaatacaatggtgaacaacactgacaaactttcttctttggaagttcacagttcagcagaaaaaaatcagttaataaatcatcatttgtgatcaagtgtgaggtacaacaataatatgcaagatacaatgtgacttcattgaaagggcacttaatgttgtttatcaagaggcagaacagactttaagaaaaatatctaaagtgaaaaacaaatggtcactaagagctcgctgagcaggggtaaaactatgttcaagaactagaaaggtacacatttcctaactggaacatcaagtgggaaagacaaaaggatgagagattaagggaaaaaaaaaggcagaatgcccagctgcaaagggcattctgaagggcttgggctttaacttaatggcaccaagaagcctttgataagtgttaaatagatgagtgacatgatttattcattttgcattccagaagtatcactctggccacagtgtggaggacagaccggatggggcaaaactgtaggcaaagtcatctgggatcagtcagttacagtcaccagggaagaaatagtaatgacttgaactttggcactggccattaggatagataacggtggatgggatggagagatgtctaggaagtcaagtcaagcagaacttgtcatgggccttccttatggattgtgtactataatgcctatattgctattcatctggagtaaatatcactgaattaagatttcatgccatgtttgtaacatctaaatgagtgactgggggcttacgggaagcctgtgcctgcaaatatacattttcatatttcataatacaggacaagagaacctctcattttaatgaaataagcacaatatttacagcaaaggatgggttgtattagagcaccagggggcttggtttacacttgaattattttcctccagttatggaaccaaacggaagctccactgggaggcactgaaataaggaacgcagcggggagctttaggggagctcttccctacagtagttgtttattttgaaagaaatgtatggtagaaaatatttccagccactcaaattctactttctggttcacgtgactttttttttttttttttttttaaagggaaggaagccttggagccagattctaagaaagcaaaatgacagcaacaactggggacaatctggactcagcctgggtgcccatgctaggcagtgatgtagaaccagagaagcctcattttaaaatctgtttcacagccagaaagtacatgaatagaagctcctttttcaaattatatttcctacctattgaatttaactttcatccacttgaaaagtctcctattttactgccagtcatctcagtcactattcagcagactatcaagagcaggtttttcttgcctgtggaagatacttttattgttgttgtttcatgatctattctgtaacatactcttatttctatctggctcaggcctaattcccaatctctcatcatttctgagcctaagcacctcatgccttgtcttataaagagttacatcacatttaaactggcatacagataaagccagatatagaagctctttcttgccattaagttatggctctcatgccattgctttctcatcatttcccagggaagaatgcagggtgttagaggcccttcagtacataatggctttttttctcgctccatcatcacaaagcactttcttaaaggatggtggagaagatagagttcctgtgataccaccattagcttctgcccggatgattggaataaacttccactatcacttctgccatcctgcaacacactctctaacctgcagctagtggaattttaaaaatataatctccccttttctgtcccctgtttttaagccttgggaactatttgagcccttcataatcttacctctgattaactctccatagattactgtggtttatccagactgattttctataagttccctggataggctgtgccattcctttcatccaggactttcacatataattctggctctctagaatagtcatccctttctattcttcaggtctcagcttaaccctcatttactctggtttttttttttccctaattattcagaagcccatagttctctttattttccttatcacatctcttaacaattctgttttgtagttgcctgttcagtctgtcttccctgatagaacataagcctcttgaaagcaaggactgcatttctcacttttaaatcatcggcatctagcaccatgactgcagtatagtaagagcttggtaaataattgttaactctttagggtaatagaaaagaaaagttctcagcttcacagcaaaaatccctctcattaatcaatggaactacctaatattaattcattaattcatgttcactcaataaatattttgaacagcttataaatatatcatggactatgttgagtattgaggatatggagatgaataaagatatatttattttcctcaagaaactctggggaaatagagacataaatggttataatatgatgtaatatatggcataataaatgtatgcataaattgctatggaacataaaggaagtaatgtttgtttacctgagcatctaaagggatagactaatatattttgttagactgataaccacttacacttcatcaagactcataactgagaagaactcagtttatgagtttttataagaagggggacttataagaagagctcataactgagcctgatgaagtgttaagtggctatcagtctaacaaaaggaaaaaatcaattcctaaaaggaagaaccaacacatgcaaaggatcaaaagctgatgagaacattagcatatccagtaagctgaatgatcaataatgtgccggatgatggtcattcattgaacctgccaggctagcaaggggctaaatcattatgtcttttgatgcaaataaaaaaaaaattgggggctactgattcattttaggtaggagagagatatgctcaggctggtactccagaaagatcactctagcaccagtgtagaagatggattggaggatggtaatattagaggccaacgagacctgttaggaagactttttaattgcattaaaagtatgagaaatatggtagacctgctgtatgtaagtttctgaccatatatctggagagaaagtgaaatgattatgagtggtttaggaggtagaactgcattgcaaaggtttgaaatatgctcttccttcttggattattatttcctcctttctttagccaagccattcatcctttatcatgcaattcaagggttgcccctggtaagttctctctgactcttccaccgcagtctgactaagataccacctccttaagctcttatcgaatatagcatgttgcctctgcaacattaaattttaagcagtttgaaagctaagagaagattccacttagcaaaatgttatcagagtgactggcatagggtatccattcaataactattttttgcattgatgaatgtatgaatgattaaatgactcctcagaaatgggaagtgagattctcaggcttcttactggacgataaggaaaatgataggaataatcacagagatagaaataacggggagaaacaagtttggagaatagtttgggaaaggtgacaatgatgacatctatttggaacaggatggacttgaggggcttatgagaagaactcctaaaagtgaactggtatgaagtccagagttgtgacttataatttatagagagatggtagtttagttatctatctatagatgattaaatcatagttcagtcacccaggagcattaggtaaactgataataaaatggtctcaacaaagaggcctgagtatcaccaacatagtggttggtgaagaggtcaaggagaaccacaacaaatgtgtggacactaatagagtagtttggagagagtgttgctataggagacaagaacagaatacatttcaggaaatagtcaacaatatcaaatatttccaagaggtcaggtattataagggtaaaaaataatcagttcatttgttttgtaattagactatttgttaagttatttattacttataatgattttaatggagccttggggttaccacggagttggtactggattgaaaattagagtcattagagccagtaagagtaacatgttctaaaaaccttggttgtaatagacgagaaataggtggggtaaagaaggaggagaaatgagaagtgagctacacagtggagggagtttttttttaatatggtaaaagataaacatgatcacatcttgagaataaacagtgatttaagagggaaacattaataatacagggggaggagatgtttcctgaaacaaggcttaggataaaatggtatcgagagcccagatgaaagaattagcattgcctgaaagagagtcacatctctgtctgagattagaaggaagaaaggatcggtacaggcctaagtttgaattaaatggggaattcattcacacttgatttattctatttctccagcaagaaggtatcaagattatcttctgaaagtgaaggggacagaggtgataaagagaacttgtaaatggtgactgttgactggcttctctgggaattaaacatggaagtaagcggagtgataaacaaaattattgtgtagctgtgcagaccttactaaaatgaatgaaaatg

SEQ ID NO: 11 - DNA, 130269 bp, Homo sapiens
gggccatttctggacaacagctgctattttcacttgagccgaagttaatttctcggggagttctcgggcgcgcacaggcagctcggtttgccctgcgattgagctgcgggtcgcggccggcgccggcctctccaatggcaaatgtgtgtggctggaggcgagcgcgaggctttcggcaaaggcagtcgagtgtttgcagaccggggcgagtcctgtgaaagcagataaaagaaaacatttattaacgtgtcattacgaggggagcgcccggccggggctgtcgcactccccgcggaacatttggctccctccagctccgagagaggagaagaagaaagcggaaaagaggcagattcacgtcgtttccagccaagtggacctgatcgatggccctcctgaatttatcacgatatttgatttattagcgatgccccctggtttgtgtgttacgcacacacacgtgcacacaaggctctggctcgcttccctccctcgtttccagctcctgggcgaatcccacatctgtttcaactctccgccgagggcgagcaggagcgagagtgtgtcgagtgagtgtgcgtctgtgtgtcccggcgagggtgcgcgctcggcgccgggagcgcggccagccgagtccggaggcatcgggaggtcgagagccgccgggaccccagctctgcgttcactgccccgtccggagctggacttcggggccggggccggggccgtgcgccggggacaggcagggccgggtcgcgggccgcgcgtcccccaggccggaggtaaaagcgctagcgcgcggagggctcgaggagggcaccgcggctgggccccccgcgccccgggccccagccgtccgcggctcccggcccgacgctccccgccccggagcgcgcccgcctcccctgcgtggaggccggcgggcaggcgagcggggggcggtagcgccgtgccaaggggctggctggggcagcgtggccggccgggctggggcgatttaagagcggtccgggcggggtgcggagccggactttggctggggcggcgcgcggggagggggccgggggcggtggcggcggcgttggggggcggggaggaggcaggaggaggagcagcagcgctcgccgggggatgcagcagcggcagcggcggcggcggcggcggcagcggcagcggcggcgcggagtcccctgcgcccagcggcccggccgggctgcggcagaggcggcggcggcgccccgctccgggtgaggttgccggggccgtgcgcgctggtgagtggggcgtggggggcaggtgggtggctgggggacgcggggctcgggcgggggctcgcggcggccggagccttccccggcgtgagcccggccgcgagcgccgcccaggtgagccggggctggtccggaccgcccggctccagccccagcgctgcttgcggaggtgggtccgggcgggcgggagggaggctccggcgccggccgtccgcagagggatgacctgtttgaccccgctggctggcgggcgggcgaggacttcccgccgcgcccctgacccgcggacacggcacaccgagcacaggcggccccgggtaggggagcgcgcctgggccggccatccgcaggggcatggccttgttgacccttagggtttagacccaagggaccggtagatgccagcccacgtggggcttgtccgggcaggactcggggaagcagtgggccggatcttcagagtggttggaaactcgcagacaccgaaaggacaaacaggatcgaaaaggcagacttcctcccaggccagggcagaacgagtttccatcgcctggcggagggatgctcccctccccggctcctcggggtttcaaaagtctagcggtgaattctaggagtgcacttttccaaacattccttatagtagttcgttcattcgttctacaagcatttctggagcaccccctcgtgccgggcaccgcgttctgttccagggaaacgcggctgaacaggatctggctcctgcgcgccagaagctgccggttcactgggagggcagcagggtagagagatgccgtctcggggtggaagatggaaagggaagcctgcaatcctagtttgcacactggcctcggtccgcaactcccccacctgcacgcagtaggcccagcacacagtaggaagagcaagccagacctgcctgtgacgaccctctcctcctcctcctcccccttgaaagctttgattcattccctgcccccctttctggaaagtcttcctgcagcttgttttaatcactttttgagttaaaagtcaatatttaattaaccaagtaattacattcagcttacgtttcaatctgggtatttgctcatctgtgcgtgttgggacacccgccctctcgcccctccatctgtcccctgcctgtttcccaccgggtccacccccacttttggggcagagaaggggaggctgcgctggagcaggttctcagggggagacagggagcaggagagacgggctttctctggaggacacccccggatctgcgcgctctccaaatttcagcttgtagtgaatagtgaaggtgatttcttgacagcctctgcctcccattacagaaccaccagagggttctaattaaattagagccaatcgttaagtataggaacggggtagggaggacagaacgaagggggccccttccctgtaagagatgttctccccagcttcgtctctcccacatcatagagaagagaaaactcatccagacagcctgtcggatgtgtaatttagcgttctaataagcagcttgaaaggcgaaggtggtgggcttggcagatggcatgttggacctttgtacatgaaggcctcttccttccccagctaaatttatatacataaaggccgtgatgttggcatcactgctgcagctgagggtcaatgtgggtttggggtttgggctttgtgtgtacttcttgggttttttatttgaatttatggctttttctgaaaccctaataacatgttaaattttcaaacttgagagtagagtgatgagttgactgtaaaagtctggtcttggaggaggacagcatagcagtgtgtgtgcatgcacgtgcatgtcccccagttcagctgctgtccaaagaacccagttgatatgcagtttcacacctgatttggacctgatttgggagataacatttccttctcactttttctggcactggttagtttatctgcttggacctgcctcaagagggcagctgggttaaccaggcagaatatcacccaactctgtcaagctttggccattatctgaccttagactttagtcctgcagaaggagtccagaagccctgtcctacagaaaaatatcagcatttctgaccagcttgtagttaaaagaaaaggtttagtccagacttaagataattggtaacacttaagtagttttgtatgggcctgatctgaggcattgatctaagcccttataccttactcattaaatccacacaaataccctgttaagtaagtactgccattgttgccatattaaagatgaggaaacaggcacagagaggattgtgacttgcctacagctggtcacaggtagagctgggattcaagaggccctcaagctccggggtccacttggaaccactggactctcctccatgaccttggcctttgtcccagatgtagaagaaacacatatgcaggggaagaaaacaccttcagacagtcaaactttgcaaagtaaaaggcccttaactttccataaacccccactgttccgacagagagtccgggtttgtatttgaggttttttgccccaaggaaaacatgtgtctgcctggtgctttttcttctgcttatgagcagacacactgtcccctcccccagtcaaaatgcaaagggaaacatcaaatgcagctgatggaaaagccaggtgaaccatggtgaagatttcagcccactcagagcacagtggccagagagcaaaagctctcctagaggtgagaccttcctgtggttggtgatggagtctcgatggcctggccctgggggtggtgccagggtgctctgtgtcaggcctgggcggatgtggaagatgggggcctctctcaatgctgatctgcaggtgagggggccctccctgaaacctgctttctctgggcctccttggaatgggccttggtggagatctacagacagccctggcccagccggattgaaggcactgtctaattgggagggcattaagatcgttataattaattggcatcccgataaatggcatggttgcctaattggggtggttgctagggaacgaggcctcacttggagcctaaaggggaagaagcgctgggctggccacagttgggtgtcagggtacagatccagcagtgaatggaccggaagggagagcagtccatccgtatctgctggtgtttactgagcagctgctgtgtgcaagttgcaaatggagtatcagttaggggtacttgcctagaagaactgtaaagtaatcaggttcctttctcttgcaagcaacggaaaaagagaagaaaaaaactcaagccagcttaaggagaaaagaagtggacttactggttttcataaccaaaagtcttaaggtgactaactctagcttcagacacagctggacccacagctcagattttgtaatgagaatccattcctatccaccgctcctctgccttccatgaggctgatgtctctccagctctggggcgggcagtccctggcagctgtgggcaccgtggctaggagagccagactgcctggctccctgcccagcagtgggatctggggcatgctacttaacctttctgtgccttgatgttcacatccaacaaatgatgatgatcatagcacctgtctcctgcttgtggtaagcatgaaatgagatgatcaatgtcaagtgcttagcagggcgtctgacccaggtgagccttcagtaggcattgactgttaccataacttaggtgtcaggacagatgtcatggagcagaggggtctcatcccctctggtttaagcccaaaaggaaagaacaagcctctgatctggcaatgcacacctgagccccatggttccctctgattggactgttttttgtccaaaccagtcactggctaaggaaatgagttgccaacaattggcttaagccaggctcacaggcctctccctggagctggatggaggctgactgctgagaccccaaagcctggaataaaacagcacggggagtccccagtgaaagggaagcccggttgctggagaggcagatggccagtgcctgcgatgatgggccactaatgtgagcaatgctggccagatggacccatcttcattttggccaaggtggagactggggaaacacgctgcctgggcaatgcctctcccttccaccagggccaggaggcatcaaaggcctgacttttctgccttactgtctgaaggatggggcctggccttgatcctgtgctttcggggggccaggggcagtgtttgtctaacctcccaccatgagaatcatctggctgtatttgtttaaaaaggcaaagaccagatcctgttgaatcaaacttctagggagggtcctggatgctggggggcatgaccaatatgtcatgtgtatattctatatcagcaggagggtttggcgaagagagctctggagcgtgggcctctttgtcttcctgcctaatgcaggggctgtcagaaggcggggaaaatgctctaggcctggcgtgctggctcatgcctataatcccagcactttgagaggccgaggtgggaggatcccttgaggtcaggagtttgagaccagcctggccaacatggcaaaaccctctctctactaaaaatacaaaaattagccaggtgtgatggtgcttgcctgtaattccagctacacaggaggctgaggcaccagaatcgcttgaacccaggagtcggaggttgcagtgagctgagatcgcactactgcactccagcctgggcaacaaagtgagactcagtctcaaaaaaaaatttaaaagaaaaatgactgcatgatgtgatggggtgggaggcaactttaggcaggctgtcagggaggcctctgtgaggatgtgacctttgaactgtgacctagattttaggaaggagtccgccttggaaagatctgggggaagagcatgccaggtagaaggaacagctagtgcaaaggcccagaggcggtgggaggggcctgtccaagacacctgccccaaacacaaatagaagtcaagtggggtaggccaggcgtggtggctcacgcctgaaatctcagcactttgggaggctgaggcagttagatcactggaggtcaggagttcaagaccagcctgaccaacacggtgaaacctcatctctgctaaaaatacaaacattagccaggtgtggtggcacgtgcctgtagtcccagctatttgggaggctgagacaggagaatcacttgaacccgggaggcaggggttgctgtgagccgggatcacacttctgcattccagcctgggcaacagagtcagactctgtctcaaaaaaaaaaaaaaaaaaagtcaactagggtagagggtcaggagtaagtgggggagggcacgtcagagatgagaaatacaggccatgctaagaaattttagactttattttaaataaaatggataactgtctggacgcggtggcttatgcctgtaatcgcaacactttgggaggccaaggcgggtggatcacctgaggtcaggagttcaagactagcctggccaacatggtgaaaccccatctctactaaaaatacaaaaattagccaggcacggtggcgcacacctgtaatcccagttactcgggaggctgcagcaggagaatcgtttgaacccaggaggtggaggttgcagtgagctgagattgtgccattgcactctagcctgagtgacagagcaagactccatctcaaaaataaattaaaaaataaaatggagaaccattggagggttttaagtcagagaatgatatgatttgtgtttcaagaagatcctgctggctcctgtgagaggcgtgctgtgcagatggaagtggtatcaccgggactgttaggcaacagagagggcccgagagtggcttggaccgtggtggtatcaatggagatggagtgaaatggggattggagatgtattttggaggtagggcccacaggacttcctagtggattggattacagagtgagggaaagggctttgattctcaaccgagggtgattttgacacccagaaaacattttaacactatccggagacagtataggttgtcccaactggggaagggttgctactggcatctagagggtagaggccagggatgctgcttaacctgcaatgtacgggatgaccccacagtgaaaaatgattcagcccaaatattcatgatgtatcctgccaaggagtcaaaggtgactaggcagcctggtgcgtggtgattgctaaatagggaagataggagagaaggttttggggaggaggagtgatctggaattccgacgtggaaatgttgggtttgagatgaaccccacctggatgtctgaaagctcagtgggtggtgaacgtggatgtctgcagccggtcggggctggcaacctaagtttgggagttatcggcatattgatgttattttaagctgtgggactggacacaattatccagagagaatgtgttttgttttctagtgtggttttctccccccagcctccccctagtgcctgtcatgaatctatttgatgaatatttttagcatatcccacatgctcacctctctgacatttccaagaagttcctgaaggctcgggctgagcctccccttcttcatcgcctggtttctcagtgattaacagacagagctaaatattcattgctctgccacagatgcccttgggaaattgcttaaggtcatgtgggatctcgggccttgtaggcagcacgatgccttctgggtggaacagctgttggcatggccttcagagcttctcctccagcccaggccagggcttcttggaattctctgtaaccagaatgttttgaattccccacgttctcttaatgtgattccaaagcacacgttgcccagtggccctggcctctgccatggagcgtcatcttacagaaggcctggcccactgctctgcacacctgggcccagcttgaatcttagataaattctatcccaaactcagagttgttatggccaggtcttgtgtgtgtaagttggtggacagggccatccccagggaccacaaatagtaccaaagatgtgtttggccatgtggaagccagatgtgttaggggaagaatgtggccaatagcttttcttattggctcatggtcaggaccccagcgggtgacttgacccaccccagtagccagagaagaggagcttttttgtttttgagacagggtcttgcactgtcatccaggctggagtgcagtggcacagtctcagttcactaccacctcaacctcccaagctcaagtgattctcccacctcagcctcccaagtaggtgggactataggcacaggccaccatacccagctaattttttttttttttttttggtagagatgagatcttgctatgttgcccaagctggtctcaaactcctgggctcaagtgaccctccaaaagtgctgggattacaggcgtgagccaccctgcctggcctggaactttttgaaaagagattgaaaaaactgttagctcacagaagccttggagatgttcctgcttggtgaaaatcagaccatctgaaagccacatttctggtctgctctcgagacagatactatccatagacttctgattgcaggccacttatctggatatttcagagaccaggaaagcctactataattcttagtagcttagagtcctgatcattttaatgtgaattgaaatggtttcattatgaggaatcacatttctgactgacagtggcttatgcaatagaaacatttaattctcacataacaccaagtccaaagcaggggagtccaggcgctggtttttcagtacaacagtgtcatccaaggtcccaggatctttcaagcctcttcttctgtcctcatcatgtctttggccttgttgcctcatagtctcaatatggctgccacagctccagacgtcgcatcaccctacaaagtgggactataggacaggactccttgctgtctctcttttaatcagagagtaaaatccttgccagaacactcccaccctagcagactttgctttctgtttcattggtccggagttgggttttgcactcacctctaaatcaaacactgggaaaggacctggctccttcctatgcttcggatctcagctgaaatgtcacctccctagaatgctggaaggacaacctgttttatgttttataacacttatcactctctggaattagcctggtttgcttatttgtcctttgtcttctctctcctcactaaaaagcaagctctgtgcttgtagggacattgtctgtcttgttcatcgctgtatccccagcactgagaaccagggtggcactctttggatactcagtaaatttttttttgaatgaaggaagcaagaaaagaaagaggcttggagagctacaggcacatctggctagcatgtttgctcgaaggtgactgctcagggcaaggatgtcaaaacctgttagtcatttgcaaaaagctaagcaggtggctgggaggattggtttcatacacactcacttgctccccagtgccagagctggggttttgtgctagcattgcttgcagaggaaggatcgtcccctttatgccacggcagggacctcacggccttgcagaagggctggtggaaccctccacttctgatgactctggggccaagctagtcttccaggtcagtggtgtgacattctaatgagggctcttgggttaaatatttctgcatgtgcccttgaaaagacaactcccttccctaaattgtcccttcctgaaagaacagcggtcacagcccaggagagcagcctctttaacctccactccccaacctaccctcctgaaagctcacatttaccgagcactttgtacaggctagtggtggtttaagtgcgcgctcctgtgaatgtggaataactcagcgatgtggggatcttccaaccccgttttacaaaggaggaaagagacacaacgaagtctctccttgctctgccatgctggtagaataggacatcacaggccacctaaccaggggctctgttcagctcgcagaaatgttttgtttgaaccttctaaaaagctgtcagatttgtaacaactacgagatttcacattttaaaaatctggattttcagcttctcctgaaaaatggggagatgtggtccccaccatcccctatagcctgacattgtgaaccaattcatttggcttttcattgcactttcccttctgtttttctcattgtggagcaatatttctctgttccatctctaccaaaagtggccagatgagagctggagaggaagtggggtgtggagttttcttatgcgtccacttcacccgtttacattatctgcctggcccacgtaggcatttgagtttgtctcccgttgtgacactttgtacccaatggctacacttccagggacattgcaagtgtccctggacacttacattgtgcattgcaagtgtgtagtaataataatgtctaatatctattgattactttttgcccagcatttcatcatcacagcaagcctttgaagcagggactaatatcatcttcactttatcagtaaggaaactgaggcactgtgtgtgatgccctcactagaacaggaggtcctgaagcttgttcatctttgtaccatctgtgctaggcttactggctgtttgaatgaatgactaaaggaatgaatgaatgatgttctcctccaagtgttcattagccgaagaggctgaaagtcttaacctcatagtcatttgtgacatttctgttgggggaatgggctctgatcagtgtcactgaggattcttgggttgtgtttctgctgtataacaaaccactccaaactcagtggtttaaggtaacaacattttattttggacgattctgtggtttgaccaggtggttcttcagcttcatgtgatatcagctggcaggtctaaaacaaccccattcaaatggctggcagctcttgctggtcaccagatgggagctcagttattctccatgtgggctctgccctatggctacttgggcttcctcgcagtatggcaggttcagggtagcctgacttctaagagtgcaaaaatgaaagctgccacggtctcttaaggcttaaccgcaaaaccggcacagcatcacttctgccaccttctcttggtcaaaacaggtcccaaagccagcccggtttcatgaggtggggcccacacaagggtttgaataccaggcagtgtggctttttggagtccaccaaagtacccattcatcacagactgcaagtagcagagcccaacacttactacctcaagctggaacaggatttactggggggctcaggaaaggacaggtcaggaactgaggaaattctggggaccttggcgcaggagttactagcagcctcctgaaggagagtttccatcccaatgcgacaaatgcacccctgctttttctttctgcccttgacactttatttgacagttggggacatggtaagaaagtctgattgaccttggtcacatgatcaccccttggcagagaggatgggggcatcttggcagaggggagggagtcctcaaaaggaagctggggtgctgtcaaaagaaggggaccagatggacaaaaattgttagaaatctctgcaccgcccctgcataggtgactccacccctggcagagcaatgaacattttaaaacgagtgaatggactttgaaagtccagtataagtagaatgcccaaacctgtgtggcagcttctccagctccagggccccatagctcaggtgctgctgggggtctggaagcttctctccactttacggggcaaagtcaactcctagaacccctgccatgcctcaatatccccctccagaagataggggcagtttgcttctggctcctgaaaggagagcatgcgcggtaatgagggacctgggctcaatgcctgcactccctcctcccagaccccgcctcaccagtgacactgccttccaccccaacacctggtgacacccagtgagtccccgcagcaggggaggctgctagtaggaaaaactgatccagactaatctcagctcgcagagcctctgacccgggctttcctcccacttgccggtctatttccggctgctaattagattgcacagcaagccacattgggaagccgacctgtcgttccaaaggcactccactcgcatctccaaatgtagcaggtgatttggtaaaagttgattctgactccttcccccagcttctaaaataattgtaagtgtcgggctgtttccaaggtgaactaatgaacagctcatctgctaatagcaggggcaagctggctgaggacggcacgctcgcctgtggattgggtgaaaaggaaagaagtaattggattattaataccaagccgtcaaaataccttttattccttttatattcttctggaaggaaacgacaatctctggaaacataaatacatgttctgtgggggtaagcagggctaagaaaatgtggggctgaaaaggaggagggggttaaaaaggtggaattgtcagtccccactgtggcagtctacactgagaaccagcccacagttaggcgtgaataatgactctgttcaagtcggactttattgcttttggccaaaggccttttgcagaaataactttgtaactccctgccagggaagcttttgtccacagctgagacaaaggaacaaagaacagaggtgggaatttctgtatctgatttctacttcctctaaacagccagaaaggacagcgggtgtggcctgcccagaaggcatgggctggggcaaaggggtgtccagcctcctgtgggccacactgccgtgctcggctgcaccatgttggtttcattgtgcacattcccaccccagggcctttgcacttacttcctccgttcatagaaagcattttgcccacaactggcttctcgcccgcctctgctctcagctcagatgccatttccttatgccacctcctcatgccagagaggcctttcccaatttactgtccatcctatcacctgacagcttcctccaaagctcttaagacaatcttcattcattcattttctcctccaccaaggtatcacagctccatgaggacagaggcctggcctgccttgtggccactgctgtttcttagcatgtggcacatagtaggtgctcaggaaagattggatagcttggaagagtcgcacatagctcccaggccaagctccagcggggctttatggagcccgctcagtgcttaaaataggttgaaagtttttactttggaaatggtgtttccggtgtagtccaggcgccaccccatctctatcctaaatctaggccactttactcactcaggtctcctgcccgacccttggatgcatttgcatatttgtccctgctttagacaaaggccactgcaaacatatctctctccaaaggtcaccagacaacatccagacttcttgcattgccaagtcttgtgccagaccggtggcctccaccaaccaggtcccattgactggatcaaggtgtagtcttcatcttagccgtccacgcacagggcgtaagtggcgttgatctcatcataagcaggtcatggcaggaggagggtcgggcaggagacctgagtgagtgaagtggcctagattcaggataagagacggggtagggcctggactacattggaaatgccatttccaacgtaaaaacctttaacttttcctttttccccttttccttttctgctctcctccaagcctctgggtcatcaaggagggaatcgcgtgaactcctcctttatggtcttcaaggagacctactcccaatgtaaggggaagcgcagaggccttggcaagcaagaatgtaaccacaatgtcattgcctttatactgttgccatctaagtatggcaggggttctcacctaggggcagttttgccccctagggggacatttggcagtgtctggagatatttttgattgtcacaactggggtaggtgctacttgcatctcatggacagaggcctgtgaacaccctgtgatacacagcacagtcccccatcgaagaatgatcctgcccacgcggcagtaatgccaaggttgagagacccaggtttatggcaatgggtgctggttcctccaagatagacttttctttctaaataaatttattgaaataagaaagggaatgaatgaatgaatttaggcccagatttgggtattctacttataccagacttttaaaaattcatttatttattctgagacgctggcatatgggatggagcacagaggttaacgatcagccctgtcatccctttcggagcagatcaggctgtaccatttgcctcaaatcaggagcccctgccctggaagctgccatcttgccagaaacttcctggggagctgcctgtaaaaaactctagcagcagttgattctggcccaggtggaaaagctgtgttatcccaggcggagttccggcaggttgggagatgtttccaggtctcctgcccagccaggcatgatgagcatccttccaagcttggccccggagccctggcccagcacccccatttgaagcctgcagagcctcatcatcactgcccccgcccccgccccatcctgccactgacaagccaatacctgcctgatgagaggggctcccagggacagcagccttccctcctggactccagggcaacctccatgttgttgggcggctttgagcacagggctcaagggcagaggctgagttggaaaatttcttgcctctgcagaagggaagagctgggggaggttggggcctttttccccaaacgaggtcttattcttctgtggggttttctgggtttgttaggtggcttcctttctacttaaaaataagctgggagtggttaaaaaatgggaagaaatcaatgtttctggcgtacatagaactgagcagatgtgttatctagaataaggaggagaggttgttgtgactctagctcctggtacgagcccttcagttcaccctcctgccctgctcagaaccccctggacctgacatcgtggctttaacacccttgggtcatgtgagaaggaagagtgcccacccaggactttccgaggctcacagattctttgaaatggacgtgagcacaaacgcccagccccgacagccagggatcagatcgggtttcacttcctaggagggaggatgtactgcaggggaggcccacgtggctgccccaggcctggccagcctctgtgacccagcaggactgactgttttacgggatggccacacggtaccctgcaggctcatccatggtgggaccttgatgctcctttgttgagatgtgggtctgtgtcccctccccttgaatctggccagacgtgcgtagccctggtggaaggaacaccatgggacagcagaaaagatgagccagctccccctggatcactgggaccctcgctgttgtgtaagaaatcagaccccactgcaaggccgccatgctgtgaggaagcccaagccacactgaggccacatggaggtgcccactccgcagcccctcccaagctcccaaccgactgccagcaacaactgccagacaagccaaggccctgctgagccttctcagcagtggcctcagacgttacaaagcagagaccagcccttcctgccatgtcctgcgcaagttcctgatcaggagcctctgagaataaaagaaagattttaattcaccactaagttttgcggtaaattgttacacagtattagtaactggagcattcagccaattccagtcttcccaccgtgcagttattcattcattcactgaacaatattcagaaaccgtccacctcttgccccttctttgctcccacctagtcatctcagtggcctccctgtgcctaccctcatgccctgcagtctgttcccctcacatagtcagaaggattctgttaaaacttacatcagggctgggcatggtggctcatgcttgtaatcccagctctttgggaggctgaggtgagaggattgtttgagtccaggagttcaacaccagcctgggcaacatagcaagacctcatctctaccaaaaatttaaaaagtaatcgggcatggttgtcctcacctgcagtcccagctgcttgggaggctgaggtgggaggattgcctgagcctgggaaatggaggttgcagtgagctatgttcgtgccgctgcactccagcctgggcgacagagcaggactctgtctcaaaaaaaaaaaaaaaaaaaaaaaaactacaccagatcacatcacccgcaagctagaaccccccagcccccttcactcagctccgtgccgccatgcgtgccccctttccggccctccctcaggcatcttcctacctcaggacagttgcgctttctgttccctgtgcctaggatgctcttcccctaaatatccacaaggcatgttccctcccctcctgcagggatccacccaactgtcatctctcaggccttcgctacccaacctatttaaagttacaccccctcactccctagcactccaacctccctccttaggacttgatctccttgggacacgttgcctcatatgttgtgtaatttattttggtgtctgatccatgaaggattgtttttcctgattcccagcactgaagaatagggccgggaacatagtaggtgctcaggaaatctcggctgcctatctggaagaattagcacctcggctctgccaggagctggggccgtggcgtcaggcaaccaagagacagcccctgcccatgcgagcttctggtggagggatgcccctctacaaaataaaaacccaggccaggtgcagcggttcacgcctgtaatcccagcacattgggaggccaaggtgggcagatcacttgaggtcaggagtttgagaccagcctggccaacatggtgaaaccctgtctctactaaaaaaaaaaaaaaaaaatacaaaaattaggcaggtgtggccgggcgcggtggctcacgcctgtagtcccagcactttgggaagccgaggcgggtggatcacaaggtcaggaaattgagaccattctggctaacacagtgaaagcccgtctctactaaaaatacaaaaaaattagcgggcgtggtggtgggcacctgtagttccagctactcaggaggcggaggcaggagaatcacttgaacccaggaggtggaggtatgcagtgagctgagatcacgctactgcactccagcctgggcgacagagtgaaactccgtctcaaaaaaaaaatgaggcaggcatggtggcgggtgcctgtaatcccagctactcaggaggctgaggcaggagaatcacttgaacctgggaggtggaggttgcagtgagccaaggtcatgccactgtactccagcctggatgtcagaggagactccatctcaaaaaaaaaaaaaaaaacacgcacacaaacacaaactcaggccagagagtaaatagaggaatcacaagttatgataagtgctctgaagagagcagtgctgggactgggggtgggggtgaccgagcagggcctgcttcagggacagagggccagggaaggcccaagtcacagccagggtggccgagtcaggtccagaatttgtgattcccacacccacgttccttccgcttttccacactaccttctcttatcagttgtcaaagaaggatgggcgagttggccctcagtaaggcggagagttgggcacaggccaaggaggcctagcgtgggctggtaggccgtgccctgaggcctctgttcacacaggcacgaggtggccaggaagccacgggagtcagccctctgcctccagcccgccccccaatttgggttcatttggttgcaagtgagagagcaactaggaatgacctaattgaaaaaagggaatttcacttctgatcttgaagagtcaaaagtatggggaaactgacctacaaagaaaacagaaactagttaaagaggaatttattgggcctgaaacaaagaacccaacccaaatcttcctctttcaggctgggctggatcccaggtgtccagtgctgttaagtcccaagtatggtgcatttcacagcactgctgtgttcggtgtgttggcttcattcccgaccccactcaagacaaagtggcgtcgctgtcttccctggtcctcacattggaaccacatggagtgagttagccagttgtaaagactggatgcctcttcctgaccagtcaggccaaagggcctggattactctggcccgtcactgaggcaaggggtggggaggctctgattggcccaggtctaggatcccacgatctagcattgtagctccagaactggagcctaatttgaactttgtggaccaagggtggggagaaaaggatcccccaatattttttttttttttttgagacagagtcttgctctgtcgcctaggctggagtgcagtggcgtgatctcagctcaattctcctgccttggcctcccgagtaactgagattacaggcacatgtcaccacacctggctaatttttgttgtttttgagacacggtcttgctctgtcacccaggctggagtgcagtagcgcaatctcggctcactgcaagctctgcctcctgggttcacgccattctcctgcctcagccttccaagtagctaggactacaggcatgtgccaccacacccagctaattttttatttttagtagagatggggtttcaccgcattaaccaggatggtctcgatctgacctcatgatccacctgccgcagcctcccaaagtgctgggataacaggcgtgagccactgtgcccagcctaatttttgtagttttagtagagatggggtttcaccatgttggctaagctgatctcaaactctggacctcaaatgatccacctgccttggcctcccaaagtgctgggattacaggtgtaagccgccacacccggcctcagactcccaagaaaattgggagctgttatagaaaggagataatcctgggtggcccaaacctagcagagaacacaagccagcatttattgggcacttgctgcatacagatctgttgaaagtctccgtgcatgttaaaccatccactctgtaggcaagtgcttgtaggtgtcctcactttccagatgaagtcactgagaagacaagaggttcagacacttgcccaacctctagtaagtgacggagctgagatccaaacccaggcaggctagctctagatcctaccctcctcctactcagcgtgttccctgtggcattttcccccaagtaagtatcaggctgtttgcttacctctgtccgctgtttgtcagctctctgagaatcgagagttttgtctgttctttttttttttttctactgatcatgaaacagtacaaagcaagtggcagatgctcaggtatttgagggtgtgaattatatggcctgtcaaacatctacccacttgacatacaaaacattttggtgctcagcttcctaagacttgaatacattgtttctaaatttcctttgtgctctaactttaatccatggccactctgttctcacagcttgccggtggtttgccattatttccagtcctcttttctgatcattctcacatgtagctggaatctttcaactccagcttttcctatgttgacttagagtatcacttccaggagggcagggagctttcttttcactgctttatccacagtgccaagaactgtgcctggcacacacgagccttcaggaatgtcttgttacatcaatagttaggcaggtaactgggttcctaagccctgcatttttgccctacaatctttatgccctaatttcctttccagatcctgagcctttgtcttgaaacctgatctttccctcctccctctgaatgacccttctattgtctcctgccctgttcttgagagccggcttggttctctgcctccatttggaattccaagaacaggcaaggagagccacaagatggcctgggctaggtaggggagacagggagaagctgtggcccataggttacaggagcttctgtcctttctttgacggccccaaagaggaggagagaaggctggagaaagcctgtagccaggaagaaagggagacacaggggagtgtaaagtttaacagatgtgcgtgtgtcatcccctgtctagacagcttctgggcttgtgaggtttgggaccacactttcccatccctccaggggcctctctctgtttcctctgcctgctctttgcccaaactgtttctcctgcctgaagcatcctgtcctccaccctcctcttcactggccatccaaatcctttggattcttcagaactttgctcctgttaggctgctcagtttatgctaagtactcctccaggaagccctccctgactgctcccaggccagcagtttcccctttcctcttgctgtttatacaacacacttaacctcagtcccttgtatcacttgttgctttccaagtcagcataagtgtcaaaagagtaggctctggggtcagaatgtctgtgtgcaaatagccatgctggcttgcttgttttgtctgtcacttggaggtggcacatccaagtgaacctcccaggggacagggaagagtggattactgttgtaatcgggcaggattctcctatcactgaacactgcctcacatatagcaggcccttaataaatatttgtaaagtaaatgaaggaagagagaaatgatcaggctccctggaccacctgaggaggccctcaggtctgttgctgggctctggccccagcccgtgggacatatctgcacacccacaatttcctttcttccctcctctcatgagtgtttcccgtctgaccaatgccgccttctgcctctggccccttcttcctctcccaccacctcaactgcctaattattaccaaacttctctctcctgtttttttttttttgttttgttttgtttttttttaaggcagtgtcgctctgtcacccaggctggagtacagtggctcgatctcggctcactgcaggctccacctctgagttcacgctattctcctgcctcagcctcccaagtagctgggactacaggcgcccgccaccacgcccagctaatttttttgtattttttttagtagagacggggtttcaccgtgttacccaggatggtctcgatctcctgacctcgtgatccgcccgccttggcctcccaaagtgctgggattacagacgtgagctgccgcgcccagccctctctcctcctcttgttggatttggaggtggagagaagatgggaagggaggaccaaagggacagtattcagcacccatgctgcacgacactgggcaggttctggaacctgtccgtgccttatcttccttgtctgtaaatggagcatcccaactcacaaggtggttgtaagggtggcgtgaggtcacacactaaaagtgcttagaattgtgcagggcccctgatgttagctatcattcattattgttcttctagggtgtttcctgtgttggtctgggtgctccctgttgcaaatgacagccctaattcggactctcttaagcagcaaagggcacttttttgagtctgtacctggctacaagatgcaacttggtccaccccattgtcaccagcatcctctctctcgggctccatccaatgggcggccaccatcagcaccatattcatgcctcctggcacccagcacagtctcctccagcctccaggactccctctcgcttattggccagacttgggtcacatgtctgccccaggaccaatcgctgaagctagagctggaattgctgattggctccacctggctcacatgcgctgccctgcagtcaaaccatatataagggggggtgggaaataagagcacttgtggcctcaaagcactaacaggggctgttaccaggagacaggagataattctttgttaagccagtaaatattttgaatgcctgctatgccgcaagcattgttttaattgttgaggatatagatctgaacaaaaatgacaaaaacctgtaccttcagggggctgatattctgctggaggacatccgcaaagaaataaaggagctagctgtgagaggtggtaagtgctactggggagggcagagatttcggttttaacctgccaaggtgaaatttgagcaaagacctgaggagggggaagaagggatggtgaagataacctgaatgaaggctccaggcagagggagcagcaagttcaagggccctggggtgggctgtgctagcatgtgcaaggaacagtacagagaccgtgtggctggaaccaggtgtgcaagggagagaggggaaggcaataaggtcggagaggtgatggagcaggttgggtgggttcttgtagcccctttggagggtttttgcgttttactctgcgtgggatggaagttattgaaggccgttcagtggaggaaggcaggcccttgcttttgttttaacaggatctgtctggctgcttgatggaagggacgaggtagaagcagggaaaccagttaggaggctgttggaatccaggcaggattctcctatcactgaacactgtgcctcataggaggtccttcatacgtatttgtaaagtgaaagaaggaagagagagaaatgatcaggttctctggaccacctggggaggccgctaggtctgttgcggggctctggccccagcccgtgggacgtatctgcacacccacagtttgctttcttcccgcctttcatggacatttaccatctgaccagtgcctccttctgcctctggccccttcttcctctcccaccacctcagctgcctgattgttcccaaacttctctctcctcctcttgttggatttggagatcctcagaggaaaacagcccatctgggtctttctaaacaggtctggatgaggtcccaggtgtttgttcaccgctgtggtttgtggcattgggaaggtgagggcatcagtcactcagacccgttcctcttggcagatcggcagagaaattgagaactaaaaatgatgtttctaaatgctcaggacgttagctgtttccagagatgtctcctgggctggcgagcctttgccaaggtcctggagaagactcaggatggagaggaggagccagagagacctggaaaggaactggtgggaaggagaggtgttgtccacagcagggatggagtggcaggcggctggtgctgcgtgagttcactgggtgctctctcggttcagccactttgaatattttaccaagaaaaaggaaaaaaaacaaggcagaatcccttgtgtcatctttaattgatttcttcagcatccggagagaaactggcatgaggccacgagaagtctgagccaggggaattcatcagaaatcgacccactgatgacttgatctgatgaaataattagctcctgttattctctggcttctggtgccggagctttgacttccatccagaggagagcgggtgatagccgcccaggagtggggggtgctctgaaaccaacatgggagccaggaacgaagtccagctgactgtgccccgggctccatctttacccagcccagggctcccaatgaagactgcccttcccagcccccctgtaccctggcatcacaggcccagggccaaaaaggccctcagagggcacctggccacctggcaaatgaggaaactgaggctgggagactcttaggaacttgttcaaagatctgcttctagggggtcctggttgagctgcccaaatcgggccagactaggtttgaaccccttctctgccacttacccatatgatcgggggaaagtgattttaactctctgtgcctcagcttcttcatccataaaatgggtgaaatattgatgggtgggtgtgcatattaattgggttgacacctgcaaacagctcagagcagagactggagtgtgctgcaagctttcagaaaggttttcctgtgattggtttctggtttcagagagttgctatttgtagggcaccccatcggaattctcccaatattagcactccacgtctgtctctctgaaggaacgtgaatgtgcatcttagaacgctggctgctgcaatcgtagtttcaagtgcaaagcatcccgtagtgtttcccgatggagggacatgggccactgataatgtattagtctgttttcacgctgctgataaagacatacccgagactgggtaatttaaaagaaaaagatttaatggactcattgttccatgtggctggggaggccttacaatcatggtggaaggtgaaaggcacgtcttatgtgatggcagacaaaagaagatgagaaccaagcaaaaggggaaaccctttataaaaccgtcagatctcatgagacttattcactaccatgagaacagtatgggggaaccacccccatgattcaattatctcccaccaggtccctcccacaacacgtgggaattatgggcgctacaagtcaagatgagatttgggtgaggacacagccaaaccatatcagatacacaacatagtttgaggattactctgatttggggtggttcagggactgattcgatggctagagtttgtctccttttcagctgtctggcagcctccagttacctccagcagaaagtctcagatggtgctaatgtgctttgactcctttcaacacctgctaatctcacttcaaaagagagtgcgagcgcgagggcacgcgaagcctgggaagctatttgcatcaagttccactgattcagctttctttgacttttatttgtacaattagctctacagggaagcgatgtccactttccatttatctttgggtaggaagttttcttttcccaaaacatgtgtttgtgtttttattttaaaatgaggccatttaaagaagcacgttaagcaaataatcactgaagggctctgcagattcagcagaaatcagggccgtggtccttgaacggaaagagttgggaaatccgagtttcgtgatgagaagcccacattgaacggtgagggagggcagaattcacatcccatccctgccatcttctgtctgggtggccttaggacagtaatgaaacctcagttttctctggggctaataatagtacttgcaggagggagccttggtggaggttgaaggagatttcagagtgcctgacgcaggacagctgcagcggtaggatcactctaataatggtttacattgtggaatatgtatcccagttagtactatggccaggctctagtcccagcacactgtatcaacacatttaatcctgcacacccatttcacagatgaggaaactgaggcacaaaggtgttaagttactagctcagggtctttcagcaagtaactccaaagtccacatccttaaccatcacaccacgtggcataaagcaggtgcccagcaggcagttgccgcagtggctctggctgtcatgaggtgtatgtttctgcagacgagagattgagaaggaaggtgttgttcaccctctggtcccatgaaactcacagttctcatgtcagacgactgcatcgagtgtgtccccagctcccctgaaattgtgactctcagagccacctgggaaggaggcattgagcggagcctgcttcctgctcccaggggaggtgctagaagggagacttgctgtcctggccagcctgacataggatacaggtccctgaatgaagtaaattagggtgcgcatcagggcagctgggagagttgattgaaagcactgttttcagaggcaggtgggcaaagggagcaaagaaatgatgctgcaccgaggaaccggtagcaacaggagcccttactttcccgagacttgatggggcaagaggagggagaggtgaactcagaactggggagacgctagagccaggaggggccccaggcaggagctgcatccacacacacagacacgaaggctactgcctggggagctactgcgtgcgggaggagaataaatgcacggacttcccaccacctcccatgctgcagcctcccagccggaagccagagagcagggacgtgccgaccgtgccatctgtagagctcagcctcccagggtgccaagcagagctgggggagaaatggagcaggagtgacccttcctggggtttttcaaccatagcgctgcccagagaacacagtggccagctcctcgttggtgtccatggagggtggctggggcaaggcatcagtgatggacgcctctgagccatgtagacccaagctatggcacggccctgccaagtccagcttccctcactctgcagaactcaaaggaccttagcagaacctccgttcctttatttatctatttctttgtgccaaggcctggagacagccatgaataacataagcctgtctctgtcctcagggagctgaccccctagtggggaagaattggacaataaataagaaattgcaggctgcagtagtgattacaagagaaataaaaccggttataaaatgcagagtgcctgggttgggggcccccgctttaaatagggtggccagggcaggcctctctgaggtgatgacgtttgttcttttgacagaaagagccaggagtacaaagcaggagtttgttgttgttgttgttgtttttgagacggagtctcactctgtcacccaggctggagtgcaatgacatgatctcggctcactgcaacctccatttcccaggttcaagcgattctcctgcctcagcctcccgagtagctgggattacaggcatgtgccaccatgcccagctaatttgcgtatttttagtagagatggggtttcaccatgttgatcaggctggtctcgaactcctgacctcaggtgatccacctgcctcagcctgccaaagtgctggaattacagatgtgagccactgcgcacagctgcgggagttatttttaaaagagcaggtgcaaagaccctggggcaaagagaagcttgacttgtccattcgacagaaagaagccagtagggctggaaaggagaggtcgaggagaagtgggcaggggccagatctcacgggccagggcagccctggcaagaagtttgcatcttatcctgtgagccatgagcagccagggaaggtgcggcaggtgagcacaggactggcactaaggtgaggcgagtgcctggcacttgtgcagcctgggagcgagcacccccttcagtctgtacctgcacgaggcactgtgccctcccctgcccagtgctgtgatctgatctgtattttaggaagattcctccggctgccctgggaaaatggaggatgggggcagggaagagggaggcgggagacccctcaggccaccttgcagtccccaggagagatgaagcaggcagcacatccccctgctgaacccggagaccttgctgagcctctgagtcatgactttgagctgatggctggggttccccatgaagggcaaggacaaacagaccctttcaaggtcacagcaacacagccacccccacagcacttggcttcctcccggcacatctgcaggctgtggctctctcgctcatgctctcttgttttaaataaatgataccaaaagtctatatctggacaggacttgaaggctcatttcctcaagaagtgaaaaaatgaccacggagagcaaagagcagggcgagattagagacctgcttgagccagagtcgcgtccccacctccccgcacccaccttcgctggtgacctagtctgacctggggccaggggggtgactgagggcacagtggcctgtggcaggtcttccccctccaccttttagcgctcaattttctctattgtcatttcatttattctgcaacttaaaactaataggctgggcacagtggctcacacctataaccccagcactttgggaggccagggcaggtggatcacctgagttcaggagttcaagaccagcctggccaacatggtgaaaccccatctctaccaaaaatacaaaaaattagccgggcgtggtggcaggcgcctgtaatcccagcttctctagaggctgaggcaggagaatcgcttgaacaccaggaggcagaggtcgcagtgagcccagatggcgtcattgcactccagcctgagcaacaagagcaaaactctgtctgggaaaaaaaaaaaaaaaaaaaaaggaatacttttttgcccaactacaagatcccttaacaaggggctttcacacgcatccccagcagactgaaatcttacaacagccctgtctactcattttgttcatggggaaaccgaggttccaaacgggcttgctcacgggaaaactgagccagtgagtggaagatctgccactcacacatgccagttgtccagcccaaaacatccagctccaggctctcgtttaaacccctgattgaatcccccgctgctggggagctggaacttcatctccctcacctctgtaccccacggtgcgggcagatgcaagaggacggcaaatattcaccccttgagaccagcccgctgctgttcctctccctggggacgatttgtctgtggagttgggtggattattcagagacggctgttatctgactcgggtcttgggctgccaccgacacatcagaggctcactggatccagggaagaaattgtttctgcagaagtggccacagaaggcttttctgccagtctgttgaccaagcaaactgtaaagactttgctaacttcagcggagttcggttttcactctgccatagccacccctgttcaaagaaactcccattgttcatgccagccgccatacaaatcattatgcaagaatgagcagccggcagccttgacataaatattgacctgattcttcctcctcctctagatctgcgagtgaagagggacgagggaaaagaaacaaagccacagacgcaacttgagactcccgcatcccaaaagaagcaccagatcagcaaaaaaagaagatgggccccccgagcctcgtgctgtgcttgctgtccgcaactgtgttctccctgctgggtggaagctcggccttcctgtcgcaccaccgcctgaaaggcaggtttcagagggaccgcaggaacatccgccccaacatcatcctggtgctgacggacgaccaggatgtggagctgggtaagcctcggggccccagggtggcacctcggcccctcggagcagggtccctgggttaggctgaggctcctgaggcaaggcggtggtgttgatgcgtcgtgctcacttttgagtacattgaaaccaagacacgggccacccacacgtgtttggggtcacaactgggtcctcaaggttaggggtctctacccttctccagttgcacaaccgttcctggatttctccaaagagttaaagagaacaggctgggcgctatggctcatgcttgtaatcccagcacgttgggaggccgaggcaggtggatcacctgaagtcaggggttcgagaccagcctggccaacgtggtgaaaccccgtctttactaaaactacagaaatgagccaggcatgatggcgcacacctgtaaccccagctactgaggagactggggcacaagaatcacttgaatccaggagaaggaggttgcagtgagtggaggtcatgccactacactccagcctgggtgacagagtgagactctgtctcaaaaaaaaaaaaaaaagatgagacatgagcctggagccaaattttggaggctcttgtgggttgtggcaaagactgtcaatcattgatcccgtgaagggtgatccctcagcctctgtccactcttaaaggataacagcgtgttgttggtggcaacaaatgtgaaggttgactaggttagccttgacaacctgaatttgtcttttagctaccaggaaaaggcaatttacataaaaccaagttgttccttgcaatgctttgtattaatgatcacaagtatagtttttttcctccgggagcttctcagtgcagaaagaatttgtagccaggaagcaatcagagcccagagcttttattgacaatttgacacataggatacctatctcctggcagcatttagaatgaggcgcatttgataactatggggagtctgcagactgtggccagagaggtgtgtttcgtttcttgaagaattttgcagaggggtcttgcaggcagcacctggacctcagagcttcttggtctcacattgtgtagccccgacgctgtttcggctatagtcatgcttagaatttccgatgccctgcacgtttgttcattcatccagcagatgtttattacgcatttgttgcattcagtgcactgtgtcaggagccagagaactaagggaggctcattccaggtgaggagaacaggaaattcaaagatactgagatagaaatgggctcggtggtttggagcaaaaaaaaaaagtgccagggagccggagtggagggagctggggccgtgatggagagagatgaagctgaggagctgacttggcccgggttgcaccaggccttgtggccatggtgggggctttgagtttgattcttagtaaaatagacatggatgagggggccttaagaagaggaaggccgtgacctcacttaggttctaacaggatcccccagctcttttgatgaaattaaatcgcaggggtaagggcagaaacaggacactcattcagaggccgatggggtgatagggcagtgatgatggaagctcagacccgggtgctgagatgcggtcccacctgatgtatatttgggaaataaactgatcaatgggttaggtatgtgggttatggaaaagatacgtttcaagggcagccgctagatttggggcccgaatcaacaggtgagtggctgaatacccactcttaggaacaacacatttttgcaacatgatccagctaagtctcatgtctgaatctgactgaattttgcatctgtgacttgtgaataaaaccaacagtgtatgcagataaaaagaaagcaaaggcatatgcagatataaggaaaccaacagcgtatgcagatacaaggaaaccaatagcaggtatgaagtagacacaggagagaggggaacaaagaaagccgtggctgacttaaaatacagagatttcttctctccatttgacagatggaaaaactgaggcagagagaagtcacttgtccaagtttgcacagctagaatgtgattaaacatgatttgagctgggtgcagtggctcacgcctgtaatcccagcattttgggagcctgaggatcacttgaggccaggagttcgagaccagcctgggcaacatagtgagaccccccccgtcttaacaaaaaatgtaaaaatcagccaaggatggtggcacacacctgtagtagcagctaatgggaggctgaggtggaggatcacttgagcccaagaggtcaaggctgcagtgagcctaggtcacaccactgttctctagcctgggcaatagaacaaaaccccatcttagaaaaaaagagaaaaacaagatttgaacccagaacgcgtgatcttagccactgctctatttagccagattcctgggatggatattgagttgttttcagattggtagcgtgtgcgtttgttagtttttcactgttacggatattgttgctggaaatttaaacaggcatcgttgcacagacaagggagtgcttctgaaggataaattctaggaggtggatgcggtgggtttagagcccctggtgttcagtggcctgtgtcagctcttgcccaatagcactacacagcatagattagggcctacaagtcttgccctctataaacaagccagacctcttccaccagcagcactgggttttgaaggaggcaagggatgggaaggtggttgtgggaggggcatgataggctttttataaaccactagacagacccagatcaataatgcatgtcccaaaaaagcccaatacattatctcacagtctctgctacaactggcatgcagcgggtggtcctaaaaaatttatcatttgctattttctgcccatccgtgcagcagttctgacagccctctgggctggagacttcttgactgagataatcccaggattctttccagtcccaggacagagaacagacgtccatcctcattagggtccggttgggaggactggtgccagatacacaagacgaggggcttgttctgtttcctaattgcaaggttggggggttcggggctgtaccacgtatattcaattttcctttccctgcacgcatttgactccctaagctgtcatttggaattatcaaatgcccaggggaactgcttccagggccatactagttcgtaagtggcctaaattatcattacatgtttaaagtagttggggacatccctgtgtctcaatggccctctgagaccaacggacttttgctggacttccgctccaaaagaataagagggaagcacatggaggtaaaggtctcgtttgcagacgtcctttgttcagggaggcagtagaatctttgggctctgccagggtttactgatttaatttgatctaaacctctggggagcctctggggctccagcaggctctgagacagcaagaggattaagacatggttctggcctggagcaagagaatttttgcagcatcccagttctgatctatgacttgagaatttctttaactggacttatttttgaagcttaaatattattttaaaaggaacctccaaattctgactgtaaaggaaaaaaccaatacccattgccttcggcaaaggatcactgtaaaaccaaacacagtgaaaaccaagtcgtgtttttaaatttcagcaagatgctgcctcccagaaagccagtgtgtctctactgtaatgagggtgacgggcagtttcagaagcggcattaaaggtgaagtagcacctgccaagactttcttcttggcctcatcagcaggatagagactagaaaagagaagaactttctcaagcttttgatgtgggggtcccacttacatggggaccacttggtggtggctcttgtatcagagggttaaggacacagccagactccaaaccccagaatatcagagcggattccccagtgctcattttcctgagtgttcacaccaggcagagatgggtgccttttcgaggcccctcagattgtcggatttgaagtgtgccccacgagactgcatccagtgtttgcatttcttttcttttctttctttttttttttttttttttttgagagagtctcactctgtcacccaggctggagtacagtggcgcaatctcggctcactgcaacctctgcctcctgggttcacgtgattctcctgcctcagcctcccaagtagctggaattacaggtgcccgctaccacacccagctaatttttgtatttttagtagattcagggtttcgccatgttggccaggttggcctcgaactcctgacctcaagcagtccgccgcctcggcctcccaaaatgctgggatcgcaggcgtgagccaccacacctggcctgatgtttgcatttcaaaagaattctttgcctctcagaacatctttatttttatttgtttatattttttgagacggggtctcgctctgtcacccaggatggaatgcagtggtgtgatcactactcactgcagcctcgacctcctgagcttaagcaatcctcttaccccagcccccgaagtagctgggactacaggtgcgcaccatcacactcagctaattttgggagtttttggggttttttttttttttttttagagatgggcttttgccatgttgctcaggctggttgcaaactcctgagctcaaacaatccgccccccattggcctcccaaagtgctggaattgcaggtgcgagccgctgcacccagcctatcagaacatctttaaatgaaaatactccgagtaaagttgcaagggtaagagctgtctcattagccaccaggttcaaatcctcactctaccattgaccatgtgtccttgggaaagatttgccctctctgtgcctcagtttactcatctataaagtggagatgatgatctgtttccctggcattcttgtgaggaatacctggcacctgtcatatgtgtgacagtttgctctcacttgggttgttaaagccatcctctgttagagcaccctgggccaatgccacagtgttgtttgtctacagcaagctttgcatatcaaaacgacattaaaatctaaatgtctcatggcactgaacagcaacattagagtctcctcccagctgacacagtggggtgagtgctgtccacgctcatgcaggtgagctggcacccactctgccaggtatgtgagcctggcatggttacataccccataatttgagtgacacttgtcaatcaagtttggcatgggttcttctgccattactgcctctgctgatgaacagagttgcaccatcatggctgttgaaaagcaactgagtggtggttttggggcctgcaaaagtgccatgggaaccagccttccactgggtgttaaaaacgcgtgtgtcacaaccactctctgtcagcctggattctctcagttacgagtgatgtaaacccaactcgagcaggattgaggaatcaaaaaggggactttattggactcatatgaataagtccaagtatacattgagcttcaggtgcggctggatctaggagctttgtctctgggtggcctctgtccctccatctccctgacctcagctttcctccaagttggctttactctcaggccagctctccaggcagcattcctggcatcactagacccacatgaacaccatacaggtgcaagccatccctgtggaaagagagcttctctcacctagaagagagtacccaaattgagtctttttggtctgacactgtctgggacttctggtcaaccagattcaggggaatggaacacagtggttggccagatggagtcaggtgcacattcctggagccaggactggagccaaccccacttgaaccatgaggactgggattgggatagagcagattccccaaaggaaaattcagaagctagtgccagaagaaggcaggtagctggtgtgcagtccagttagagagatgctcgtgacaccctcacatggcgctctctgaagcagctgctcaaactgtggaccagacttattcattcggcaggtgtttcctgagcacctactgtatgccaaaggagatccaacagcaaacaaactaaacagagcttacattctaatgcaagagttaacaagacacatcgaatctatagtacataaaagagcagaaagtgaggaggagaataaagccaggaggggaagccaggaggggcgatcaaccaggagaaaggtggagaaaagaatcgctgggattttctatagggtggtctcattgggaaggggaaatctgagcaaagaaggtaaggaaaccagtcaagggggatccctggggaagagcactccaggcagagggaacggtgtgtgctaaggccctgaggcagatgcggtctcagcaggctcagagccgcaaagaggccagagcagcgtgcacaagagcagcaggaagaatgaacggtaatagggaggtggtggttggatggaccgtgcaaggcatgagcctttgaatgggaggaagattttggctttctgagtgagatggacaccaatagaggacattgagcagaggaggacattgagcatctgatttgtgtcttcataggacccctctagaagaatagactgaataggtgtaatgagagcagggtgtccagtaaggagtctactgcaacagtccacgcatgagatgagcccaatgaggagtctattgcaatggtccaggcatgagatgatagcggttcagaccagagtgaggaaagtagtaagtgctggtcatatttcaaaggtagagctgatacaagtgctgatggaactgatgagggatggtaaagaagagttgagaatgactccaaggttgtggcctgaaaaactatgagaatggattttctgtgtacagagatggggaaaaccatggttagaagctgtgggccgggtgcggtggctcacacctgtgatcccagcgctttgggaggccaaggcacgcggatcaagaggtcaggagatcgagaccatcctggccaacatagtgaaaccccatctctactaaaaatacaaaaattagcggggcatggtggcacacgcctatagtcccagctactcgggaggctgaggcaggagatttggttgaacccaggaggcggaggttgcagtgagctgagatcgcgccactgcactccagcctggcgacagagcgagactctgtctcaatacatcaataaatcaataaataaagctcagttctggacctgggaagttgcaggtgcctgtgaaaagccaacaggaactgtccaataggcagccacatcagtcagacgttgaagagagaggcccaggcctgggtggacttagagtagggcacggtggggatcgtatacaaactgtgtgcttgtttgtgctttactgaatctgagaccctccccagatcctgaaagttgcaggaatacagcctggagaactgtccagtgggagaggcaggcttttgaaagaaagatgtagcagaggtctggccggcctcctgttttccactttccatctgtgaacacaaggaaaccacaccctgtgccacagcctgatatccaggagatcaattccaaatcgcaggctcaagtactctctgtaggggccagatggctggaagcccaggacaacatacccagattccagacaccagatcagtggtaacttccagctcagcctctctgagatcccacctcctggccttctagccgctgatcactagaggagaaaaaacatgtggatgcaggttatctcaggaagaagagaggctcattcggacccacactggtgttcagcttgccaagcacattcctgtaagatgattttttttcaattcagcaacatttgggagatcacttgagttctggaagttaagtgtatcaggattaggtttggctgcatgtaaaagaaaacataaaataacagtggcttaaacaagacagaattatacaaatgtctggaggtaggcagtctagggctggcttggtggcttcaaggttatcagggacccaagctccttctctgcctttctgttccatcatacttactgcgtagcttccatctgcaaagtcaccttgtggttagaacagctgctggagctccagctctcatagccacactctaggcagcaagaagaaggaagcagaggcagaagggcaggaaaaagaaaaaaaaaaaaaccacttcagaagtcacatgcaacacgaatagatcttatttacttagccacatgatctcagcgagaattataaagcacatgcaaatttgaatcattggaagacggtttaagtgttttttgctaaggtgtgagcaagtgcgaggaaaccactagggatagggcagtgccccaggctaattagcaacagtgggacaagaggttactggaacccagggacacagagggtcaccccacaagagctgtcaccctctgttggcaccacagagaggaaggtggaggaatctgtccaccaacctcactctcttctttctccgatctcctgccaggggcccttgtcagtcaaatccaacccaaagcccagagagcgaaggggcttgttgaaccagcacctccaggccagtgccctggggtggagaactggacagagagcagggctggaaggcggcaggcaggctcctggcacatctttggccataagggaatctgggaaatgtttcctagctgggtgcattgaaaataaagtcacagcctgatcagaggaagaaggagaaagagatatttgtgggcaactgagggtctcagcaacaccagagatcaggagcaagggtcccagtgagggcagctcccctagcagtgggaagtggggttgtgtggcctaacactggggagacctgtgtcatgaggagacattcatgtggaaacccgaggcaggagcactgcaggcagaagcacggcacgtgcaagagccctgtggcaggaacaggtttcccaggacgttggaggagggcagcaggacatgggaatgaaggggaggaggatggggaagagggcggcagagagcagacaggggagacctggtggtccccagcaggccatgcagcagggtctggatttgattgcatgcccgatggaaggtccccagaatgttctgagctggtcagctatgcgtgcatgttctcagaggcacaccccggctgtaggtgaagagggtggcccagggacaagagcggaagcagggagatcaggtggtgtttgcagcagtccaggtgggagatgctggtggtacggagcaggacggggcactgcagagcgagagaggtgggtggattccggtgctgcttggaaggtcggcagggtttgctttatggatcgtgagtgggtgggtgagggaagaggaatcggggatgactcctaggtttttggctgagccgttgggcagatggcagtgccatttacagagatgggaaggcgggggcaggaggaacagattgggagaggtggggaagggggggacattaggttgctttgcaaacatcacccaccaggcctgtggctgggcagcagctctgcgtagccccttctgaaaagtggggaaaacaccctggaagccctgccccattgaataaatatcccctcccagggatggtgattgtagcattttgagttagaggaatatttctgggtggagtttctcagagaggaaatgaccaatcattgcagagcctcgtcaattacacccaagccctgccctttcccacgtgtgctctgccacctctctgctatggttgacgatgaccatagcagaattttctcccaggaacttctgcaaccagaggcagcagaaagcaacggagaaaaaattaactgcatggtctctctgacaacccgatgcttattaatagaatctcagtcctgcctcctcgacatctgcctaattgattttgggtttaggaaccgatttggagccttggcttttcgtagctgaaaccagcaataacatttgtctttattttgtaatgtccaagagtcaggaatggttcacctttgcaccaacaaaagaaaaacaacaacctctgagcaacaggtctccagaatccagtgtaattattctggattgagttacaggcacagcaagagttgccaccagcagcagtgagcacatctatactaggtgaaaaataagagattccctttttatgtgtgtgtgtgtgtatatatatatatatatatatatatttttttttttttatttatttaagttctagggtacatgtgcacaacgtgcagttttgttacatatgtatatgtgtgccatgttggtgtgctgcacccgttaactcgtcatttacattaggtatatctcctaatgctatccctcccctctccccccaccccacaacaggccccagtgtgtgatgttccccttcctgtgtccaagtgttctcattgttcaattcccacctatgagtgagaacgtgcagtgtttggtcttttgtccttgtgataatttgctgagaatgatggtttcgagcttcatccatgtccctacaaaggacatgaactcatccttcttttgcccaagtgtggctcccgatttctgctgtttgtgccccaggcctttctctcccctctgctggagacagagctattctggggcagttggtcaggtctgatggagcccagcctgctgcagcccattagcaggtgttgccttggtcatggcagggagctcacaagctgatcctacagcactgcggacattccagggacatttgagggccaggagagggctgctgaatgagttccagcctgttaggtggacaccagtagccagaggtcagtgcaggacacaggttctttcccgcctgtggctcgacctcatagccctcttcatcccccacctgtccaggtcaagactctgttccaacctgtacctgaccccacagcctctcttccccactgaatgcctgttctctgcaggtctctgggccccagtagagcgttacctttgcagatttatttagctgctcccttcacttggaattgaatcagctaagggttgcaaactccatgcccacagggctaggcacgtgctggcaaggaggaagtcggcatggtaggggtggtggaagaccagaggaggaccttgtcaagtgggccttcgctactcaggtccagcccactgtgggcccatcaaagccaggtctttgcatttttcaagcaaagccagaaagctgaattgatgtgaaatctcgcaattaaagaaaaaggccattcaatttttaaaatcctttccttttgggcagacctaaatcaaacacacatgcagacaagatttagtctagagggactccgttttttaactccgcgtgagacgatacttgttgaaaagctgacatgtggccgggcacagtggctcactcctgtaatcccagcactttgggaggtcaaggcaggtggatcacttaaggccaggagttcaagaacagcctggctaacatggtgaaaccccatctctactaaaaataaaaaaaattagccgggaatgatagtgggagcctgtaatcccagctactcaggaggctgaggcaggagaatcacttgaacccaggaggcagaggttgcaatgaaccgagatggtgccattgcactccagcctgggtgacaagagagaaactctgtctcaaataagtaaataaataaataaaagctggcatgcattaagtgctttctgtatgtcaagcattgaactaaaaaagtgtgtgtgtatgtgtatatatatatatatatatatatatatatatatatatatatatatatttttttttttttttttttttttttttttccctcaaaactcagaacaaccctgagaaggaggcactgttattctcccgctttgcagatggggaaactgaggtgcagggtggctaaatcatttgcacaaggtacctggttaataggaagtggcagaaatcaagatttggaatcaggccttctgactgaaaacctttttcatcctattgagtatggtgacatagcgataggttctagaatctatcctagaatttcatagtcaaaccttatacctaaagttatttatgggctgtgtttttacagacagggaagctgaagctcaaagtcagtgatttacggcagttcacacctcattcttggcctctcaattcagtgctctttggcacccaaagtctacagatgaaaaaggacctggtgattcagtctaggactgaagtgtatatgtgcatctgtttgtgtgtgtgttatacacacacacacatattcatttgtagcagctgaacccttttaacatacaaaacaaaacaggtaagagaggaatcaggagaaggacgcggcctggagaggggtgtgtggtgcccccttcatcctcagcctgccccatgccaggtggactttaatgcccctctcctcaaggaaagaaagcacagcttgggggcccctgggagcagactggccccaggtagagtgtagcaggtgatatgtggccacaacagtggccacagtggataacagtgttatcccaacactgggaggccaaggcaggaggatcacttgagccctggagttcaagaccatctatagatttttcggtcatctatagaaagcccactgtgtgccctcttcccctaaatcccagggcctgcttcacataggggtagcacacagacaggcctgcagacccgtgcaggaatgccaagtgccaaatcctgccctctcccattgttctagaaacctgtggccctcttgctgcatttatttattttttatttattcaggagttcaagaccagcctggtcaacatggtgtaaccctgtctctactaaaaatacacaccaaaaaaaatagctgggcatggtggtacttgcctgtaatcccagctgctcgggaggctgaggcaggagaatcgcttgaacccaggaggtagaggttgcagtgagccgagatcgcgccgctgcactccagcctgaaagacagagggagactccatctcaaaacaatcaataaaattacacaagcaaaactttaaaatatccaagtaatgcaaagcagagatagcccttgactccccacccaccgtgtaccccactcaccccaaaggcacctgcatgtcccctaagaatctgtagcctgcatgtcccctaagaatgtttactcttcatttactcacacggaagcaccaggaagagcagcaaaaggcaagaaggaaggggagggcatgattctaatcagcacagtccagagaaagccttgctgagaaagtgatatttgcagaaacctgaaggcaatgagggactgagtctgggctgaggagtggcaggtgcaaaggtcctgaggcagaagcgtgcttggtgtgttcgaggaacaacaaggaggaggtcaatgtgactggagcagaggaagcttagagagagagcgcacagtaggagttgtagttggggcgagtgagcatccggatcactgaggaccttgtaggacagagggaggactttgatttttactctgagtgaggcgggcagtcactggaagacaaagagcaacgaatatgatgatttcactgactgttttaaaagaagtcctggccaggcaggcatggtggctcatgcctgttatcccaacactttgggaggccaaggaaggaggatcacttgagcccagcagttcaagaccagcccgggcaacgtggtgaagccccacctgtacaaaaaatacaaaaattagctgagtgtggtagtgtacacctgtaattccagctactcaggaggtggaggtgggaggatcacctgaacctggggaggtcgaggctgcagtgagccgtgatcacactactgcactccagcctgggtacagagtgagaccctgtctcaaaagaaaaagcctctggccaccaaacggagaatagaacagcttgggagcctactgcaatagtccaggcagagaaaacagtgattagagtgaatttaagtcaaggtcctgtgtttactgactccgcctttatttttctccctgccccattcttccttctgctgctttccctaggaggccctgccatcacagactctaataatatctataattttaagaaactagccataggaaggcatctcactagttatacatcaaaatcacccaagttgagggccgcagggatttgtctgggaggggtacagggttcccctgctcccagctgaagcaggcctccaacagataggagccacctaagcctcaggaatggcaaaaaaaaaaaaaaaaaaaaaaaaaaaaaatcatgttttgaatcctgaaactccctggcaccttgctaagtccccatagatagtgtttgctctgacttagacctttagaagagcaaattcattcagcatttcctatgacactggcaacgtcgtcatctgtggcaggtcagcaaaatattgattttatcaacgatggacttactggatggtgcatccaaaaatatatatatataactcacaccttaattctctaactcgacgtagttaacttggattgagattaaagggttttttcttaaatcacgttaaatacaaatatcaaacaaatcatagcacagtggtacacaggcccccaaaaagccaccgtgaatggggaggcagttcaggagtgtcatgggagaaactgcattctagcagttgggtggtttgggcccccaagtttaaatcccaacagatgggcctgggggtgaggcctctccagcccatcagagtcacagaggtgtcagagtgacctcaccctcaacccagtatggtgggaaggtttggtcatggaaagaaaccgggtctgtttttgtctgcatgtccccaggtttatgttggacgaaagaagttgaggttggctggcccagctgcattgaaaagcttgaaaactggccttttcatttctgtgtggccgtgtcgttcaggtccttccctcccgtcggagctgtccttctgcattagggctggggctgggcaaggggatgagatcatatgtttttgtgttacagaggtaggtttacacagcctcgtcgctatggcagttttaataaagcaggttactgtccccaaggggaggcttagcacatagcactgcccatgcacagatgctgctgtcattccggggcactgttgtcctttactcgtggattgacacagcgctcctccgccagctgatttgggaagggtgagtgctggccaagagcacctcacagctcgcttcctctggaatgaggaggaaggagatctaagcatttcgagaccctggatctgagcccattaaaaacaagaaatggttctggaggctgttcactgtttgccaaggcagcactgggggctgcggagtgcaggtgatttcatcaggtgacggcctgccctgcgttcccttccaggagaagggtctgaccagttaggtgggtggccagcttttgtcctttctgcagggtctggagaccgagagaggctgagctctcactaccagctgcttcgtcctttctccttcgtgtttgggactagggagcaaaggatcgattccacttggggtgccctggactcgtgcatttaagaaatatttatgagcacccactgcgtgccaggcactgttctaggctgagctgtggagccatcaaaagtcacagggaacagcaaacgggatcagtagataaaaacataaaagtatatcatgtgttagatgatgagtgcagggttgaaaatgtcaggcaaggaagggagtagaaaatattgggggccagggaagactccacggagaagggaacttttgagtaaagacaagaagggggtgagggcaccgctgcggggctccgggggagaggtcttccaggcagaaggaacagcagggcacaggttctgggatgggagcacgcctggtcagtctgtggacagagcaggggaccctgtggctgcagagagtgggcggagagggggatggggttagggaggggaggggattgggtcccaccacactctgtggatggccagaaagatttgggctcctctgagtgagcaggagccccggagagtgtcaggagaggagactctggctacaccgtggggaataagtgactggagtccaatcaggaagcaactggcctgatttcagggagagaggatgatcgcctgacccacgggggaggtggcaagggtacgatcgtgggtgtttacgttgaagagagggcaacaggctttgctgatggattggatgtgggaactgaaagatgggaggaaccgtagccaagatgattgcccaagtacccggaggaaaggggagtggcttcgggaggagcaggagggacggtgacatcagggcttggctgtgggtgtggcacctgaggtctaatcgacagccgaatgacatcaatggatgtcagggttgtaccaagccacacatcaagggatgtcaggtccgggttttaccaagccaatgattgccaaattctaatcattccctcacaattttcatcatatatctgtgtgccacttgtacgattatttactttttaaaaatcggctgcaattgtttgttgttgttgttgttttaagaggatttccaccaccctaaaggaaaagctaaggttacttgccctaagtagaaggaaaccaagccacgcaattaatctaaggcaatgccaccccctgcctggagctcccagtggcctttcacaccaccagcatccctggtgtttggtgatgtgaccctgggccacccccacccctggtgtgcctgatgaagtcaccactagaggacccccttctgggtcaccaagggaccattctgagcttaactgaagccaagagtggaccaagagcatggggacctctatgcacttcctcaggacactgttaccacctcccgtgtgactgtgacattttgtgaacgtgaaactcagcaccccgcctctgctaggcttgagtcttcactgccttcccagctgtgcagccttagccagtcattcagctccccaggttcagttccctcttctgtcaaatgggccattgggagaattaagtgatgaatgtcttcagcccagccataagcattcagccagtgatagtcgccactattaattataatgattattactggcatagaagactgccctcttccccaggaataagttggagtgctctcagttccttagctatatcagaaggttgcaacacccaagccttcaggggtcgggcaggtaatgagagtgggtgcaggtggtgtaagactgtagggagcacgggggagtgtggcaaactggagagcacatatcctgtgtgatgctatttaatgtcacatttttaaaacccactctacaagacaccaacacacaggtctgtggacaccaactggtttggattcctgagatatgaaaacccgagtgtaagatagtattttatatgttaatttagctggtctctgttgagcacattatgtgccaggcactgtgctaggcagtgaacaaagtaggctgagtctctgcccttgtggtgaaggcagcaacatacaaataagtgaaatcaaaatgacttatgtttgaggacagtaactgctgtggagagacacggagcggggaagcagagtggagagtgctatgggttgcgggaggtggtttcaatacaggccagggaaggcctctccaagaaggtggtgtctgatcaataacttgaaggagacagaggtagccctgtgattggaggagtgagagcatcccaggctgggggtacggctgaggcaggggccaggaggtgggagggcggccaatgtgcaatactgggacctcaggggcacgaccttggtgccttgattggtggtaaaaatttaaagtagaagcagctgattgctgagcagagggccttccccagatcccaggaggctgcagtgggtctgatgcttgttttcaggtttctagggggttgctaggtgattgggatcacagccttcacatgcctggtagaccctgttttggtttcccactgctgtcctaacagatcacaaactgggtggcttaaaacaacagaaatttactctctcaacagttctggaggccggaagtccaaaatcaaggtgttagcatggctgtgcttcctcagaaggctctaggggagagcccttccttgcctcttccagccctggggaccctaggagttccttgttccttggcttgtatgtgcatccctccagtctctgcttccctttgaatgtggccttcccctctgtgcctgtgcgtcttctccactttgtgtcctatgtggacacttgtcactggatttagggcccacctggggaatccagaacaaatctcatttcagtagcctcaatttaattacatctgcaaagacaccctgtattggtctgtcttcatgctgctgataaagatatacccgagactgggtaatttagaaagaaaaagaggtttaatggacttagttccatgtggctggggaggcctcaggatcatggcagaaggtgaaaggcacatcttacatggcggtaggcaagagagaatgagaaccaagcaagagggaaaacctttataaaaccatcaaatctcgtgagacttattcactaccaagagaacagtatgggggaaacaacccccatgattcaactgtctcccatcagatccctctcacaacacgtgggaaatatgggagccacaattcaagatgagatttgggtggggacacagccaaaccatatcaccctctttccaaatatggtcacattcacagcttccagaaattaggacatggtcttatctttaggggacgggggcaccgttcaacccactgcacaccttaagaactgcaaggaaaaggggaaaaaccaaggatggccatagaagaaggagagagggtttccatggaatatttccatcaaatcactaagggtctgggtaccaaccacagcatacaattgagcatgcactcgtcacacctatgttgagtacccactgtgtgtcacacacggcagcagtgctgaggattcagcgctgagcggagcacacagcctttgccctcctgggaccttggcctgcacgcagtagggctcccacacacgttcatttgcttccttccttccttcttgcctttcttcctaagtgtcttgctctgcttacagcttggttgagaaacaagagcaggcatggccaggcaaggtggttcatgactgtaatgacagcactttgggaggcagaggcaggcggatcacttgaggtcagaaattccagaccagcctggccaacatggcgaaacgtcatctctactaaaaatacagaaactagctgcgtataggggctacttgggaggctgaggcaggggaatcgcttgaacccgggaagcagagattgcagtgagtcaagatcacaccactgcactccagcctgggcaacagagcaagactctgtctcaaaaaaaaaaaaaaaaaaaaaaaaacaaagaaaagaaagaaacaagagcaggcatgaccgaaacctcgaagcctggggtatgatcagtactcaggacacatgctgcaagactgctcagagctctcaagcccagggtggtgccagaggctccctacgagagggtactaggccgatgggttggatttggggtgaggggtggtgggttccaggctcgaagaaaagtgtggacaagaggccagcagggtttgtggctgatggcagagcacctcagccagggaatactcagggagaaggtttgccaccaggttggcatgaccagatttcagtaagagcaaacaattattgggaaagttccaaagaaaagaaagtataatcttccctcaatttacatggtggttggtttccaaaagaaaaaacaaaacaatgtatattaataccctgcaaaaacaatgttgtgtttaaaatttgtaaaacagtttgattccagtctcaggtcatttataaacaggtttttacctgccttgcaggtagagatgcaattacagtaccggacagtgacagtacagtcacttacagtcactcacctccagcaccattgcaaaatcctccagactccagacctggacctcaggagtgtccaggtggactcgggacccagggtccttcctgattatgcaggacagtcccaccgtgcagcagtggcccctgccccgtctgccccgtaggtctgcagaatgtgcccactccagacctagggatgccacgtgctgagagccccctggtgccggtgccgcccgggtctcctgccctgcgccttacttccacccttgacttgcaggttccatgcaggtgatgaacaagacccggcgcatcatggagcagggcggggcgcacttcatcaacgccttcgtgaccacacccatgtgctgcccctcacgctcctccatcctcactggcaagtacgtccacaaccacaacacctacaccaacaatgagaactgctcctcgccctcctggcaggcacagcacgagagccgcacctttgccgtgtacctcaatagcactggctaccggacaggtgagcagggacgggggcaggtgcaggaagggagtgacagccagggcgggcgtccctaggtgtggtctgcacaccactgcggtacccaagttgattctggatagcccctagagcaactctcttataatttcagagttgtgcatttatttctgtgtgtattaaagaaatacagatttatttgcctacagtagtgatgtaaagtgaccttgtcaaaggaatttgagtcccccaaaaaagtgagtcttttcaaactatgaatcatagtgtggagaggccataaggtgcccatgcatgagtttgcatcctctgttaatagttattaagcccatcagggactgtttcgttgacttcaaaccattagcttggaagaaggttccaaaacataggggtgggggatgggaattcatggaggggaacagataatggggctgtgtggtcgctttctacgtggcagtaaccaaggtggtgcagaaactgacatggtggttgactgtccacactcacccgtgtcatcctgggtggagggcgacccagttcctgtttgcttatccttcaggaggtctttggtgggctctgaaggctcacctgccaggctggttgtctgaggtagagatgcaattacagtatagtcacttacctgtagcgccattgcaaaaccctccagactcaattcatttaacttgctttaattaaaaataaataaatactccccgccttgggtaagaagccgcggcggttgtgaaatcaagatattgtggctcagatgttgcaaccccaggaagttgcatccaagtgacaaggggtttgtttgggtgggagtgccgcaagggaaggatggactcctcctccagccctgtccgcagtgctggacctgcagccctcgaggctgggcagcttcctctcagatacacagtgtgggctggcagggatgctttggtgtggggagcaagccagtaaggtgtgtcttcttacagcctcatcccatagccagaatcacctagaaagtatgttctgctgagaactaggaaggcctcgttcctataccttgttcctgtgtattgtgcgtgccattatgcagaatcaaccacctgttggttcccctgagcctctgcagaaagccacatgtgtcagaagttaccatggccaccaccctagatgattggcgggggcctggatgttgctagcagaagcaggacaggcaggcccgcagcacagcagtgggcccttattgaagatgcacctgcaacttggctctagaaagtacagccatgcactcaagagtgaccagccttgaaatgttttaaagtctgaatatttcactgaaaatcttattttaaaatatgccggcacagcttattttttctttaatgtatactgggggccaaagaaaatatgtctgaggagtgagtgtgtggctcacagactctcttttcacaacctctgggtgaaaggtctgtacagaaacctttcgttttggatgctggaagatcagtaaagaccctagacctgttctcatcaatccccctcatttcacagccagggccactgcagcccaaaaaagagacctgcccagagtcaaagtgaggtgtttgtggcataatcaaaatggaatgcaagatcatgggaattcagagggggcatggaaatagtattcatcagactgaaaggaaactcatatattctgtgccattttgagggctcagggtgggagctaaaggctagtgtttcaaaatcttacaggcgacatgagaaaatcaatcatttcaagaataaacattctctaaagtggatttcccaaacttgtccttgaatgtatgcaaatcaccaaaaagctgtctccctaaataagtgcttttattcaactatgattcattattataccctcatgaagactgggagcgtaatgtcaagtgtaaagagccagataccgagaacatttacgtttttgtaaaactgccactgagaattttattcattatatttagaatgccactctgtacaaagaatcccattccagccttactttcagaactcaggaccctgaaaacacctgtttagtctgatgaactggtgtactccttgttattacataataagagccacataccctgtatagtttccctctttgccctggcagctaggaagctcaggtttgagttttatattgagttgttgtttaaagtggaaatgtttttaaagatccaactgcgtgatatgttatactgatcagtgttgactaagaaaaatgacaaaaatctataatgaattcaaaaccttttagattattttttccttttagattgatttgtacatacatattagaatatactgtaaatttttaatcccccaaggaccaaaagtaaattgttcctgctgagtcttcagccatgttaaaccctgtgttcacgtggccacctagcaaagttggttcagttggatttaagtttggctgtgtgtgtgagagagaccggggatgtcaaataaaattccaagttgttctggtggccctgctctatgaagtggtcagagactccgactccatttctccttatttcccattggtgagaaacaagtcatatggccatgcatggcagcaaaggggcctgggaaatgtagtcttattctaggtggacatttgcccagatgaaagttattttactgtgggagaagaagaaaacggatactgaaggacaagtgaagtctaggccaccctaacagttattagccatttgtgtttgtgatactcgtttgaatagaggagatcagcccaaactgaggaagactgaccccagaaaaatgctacttaagtggaccaacatttcataataaatagtgcttttaatgtatttagtaaggtatttgatcttgaaatgaaactacaatgtttcgagaataactctgttatgttacatctctttttttctttttctgagacagagtcttgctctgtcacccagactggagtgcagtggcacagtctcagctcactacaacctctgcctcctgggttcaagcgattctcctgtctcagcctcctgaatagctgagattacagacgcctgccactacgcctgactaatttttgtattttttgtagagatggggttttgccatgttggccaagctggtctcaaactcctggcctcaagtgatccacctgccttggccttccaaagtgctgggattacatgcatgagccaacgcacccggccctctgttaggttgcatctaatgatatttaacaaatattgggctctagttgcaactaatgagttgattcttcaagcaagtgaattgacgaagtgtagggaggaatataatgtgtttcacaaattgaaatggatggcacaagatgatatcctttacttcactagggacatttttgcaaaagtatttgaggatttgatcaattttttcaagggcctctcctaattctctgacatctgaatcttcccctgtgaagtgcatctcatacttcatcatccttctcaatagtctcttctccttcatgtagtatctttatagaccaggtaattattcgtcagtggatttgcatgtgttttttgagctatcttccagcgtcattttaattaattttacaaaccctgcatcttttaaaatatttgcaatttcattttgcagtgatcttgctttgcatggccccatgtttgcagtggagattgacaaaagacaaaatgagagaagctaagtttaagcaggataaatatcaatttgttcatgaatatttctctgtatggcttcttacaacttgagggacttggatctcagatatgaatacccttggaaggatcaattgcatcctcaggttttttgttttctttgtttttttgtttgtttttgagacagggtctcactctgttgcccacgctggagtgcagtggcgtaatctcagctcactgcaacctccacctcccgggttcaagcgattctcctgcctcagcctccccactaactaggattacaggtgcgtgccaccacgcccagctaattttttgtatttttaatagagacggggtttcaccatgttggccaggctgacctcgaactcctgacctcaagcgatccaccctcctcggcctcccaaagggctaggattacaggtgtgagccactgcacctcgccacatcctcagtttttacaaaggttttatagtcatcctttaacacagttcagcagttgaagtgctgttgccctgcctgtgatcacttatatatccacaagtcaaagttgtacagtgttcccagaatgagacacctcccagctctctgcagagtggttgagggcattagctttgcctgggtttgaatccagtctctgctgctttctgcctgcatgaacttggacaagttatttagcttctgtgtcttggcctcctcaaccacagttaataatgtcacttaactcatagagttttgtgaagattaaatacattagaacagtgtctggtacatggtcgtggtaggcacttgggaaatttagcaatgatggctgggtgcagtggctcacacctgtaattccaacattttggggggccaaagtggaaggatcacctgaggccaggggttcgagaccagcttgggcaaaatagtgagatcccttctcaatttttaaaaaacagtaataaaaaaaagttagcaatgacgatgacgatttgcacaatagcacaacatcacacagcccacctcaggccagtgttctgatgaatgtcatggtaagttgcactcatggatcaaaatgtggcagcatgtgctcagcctctggtaatcagcaaaatgcaaacgcagccaacagtgcattatcacatcccagccatgaccacagcaaatatgaagaggtcccatcgcaccaaatgttggtgagaatgtaggaaaacaggaaatcatatgcgccagcagcatgatggtaaattgttccctccactttgaagaacagtttgccaatttctggcaaagctgaaaatggacatctccttctactcagcaattttactctggctgtgtccccctcggttctgaggaggtgatgttgatgtgtgagttctgcttgagcaagggaacacacttcctggctgccctgtttgctcttgaagatgtgtgatgctcatggcaatagattccctttagatccaacggacaggaaccccgactgcagctggcttcaaaaacattgaattttttgctccctaaacaggccaggcacggtgactgaagcctgtgatcccagcactttgggaggcagggatgggcggatcacctgaggtcaggagttcaagaccagcctgaccaacatggtgaaaccccgtctctactaaaaatacaaaaattagccaggcatggtgatgtacacctgtaatcccagctacaggggaggctgagacaggagaattgcttgaacctgggaggcggaggttgcagtgagccgagatcgcaccactgcactctagcctgggtgacagagtaagactctgtctcaaaaaaaaaaaaaaaaaaaaaaagagaagatacaggtgagtagcaggcagagtcggatcttgtggtttacgagtatcatgatcatatcacgaggctggaggtctggacatggtggctggcactccagcagctgtgtgcctccttgtccacatctggcaggagcaagagagcatccttttccagaatgctcaaggcatgagatcccttctgattggaccaccctgagtcacatgccagcccctgagccaatcatcatataaagcacatggtttgtgccaacttgcccagcgtggatcacctgctctgcagcagctggctgagtccctttttccccagcacttggactgccaggtagaaatcaagggctgctggaaagaataaggaaaagcatactggagtgccgatcacaattttactacactgcctttggcaaacaaaaaacaaaaaaaaagtaacatcagctggccgggcacagtggctcacgcctgtaatcccagcactctgggaagccgaggagggtggatcacaaggtcaggagtttgagactagcctggccaacatagtgaaacccgtctctactaaaaatacaaaaattagctgagtgtggtggtgggcgcctgtaatcccagctactagggaggctgaggtatgagaatcacttgaacccaggaggcggaggttgcagtgagccgagattgcaccactgcactccagcctggtgacagaatgagactccatctcaaaaaaaaagtaacaacaacaaaaaggcaaccttttccagctctttctggtgaactagattggagtgccattttctccccattgggataatgcctttctccttccacacctgaatctggcagttctgaagttgtttcccagccccagcttctgccatccggtccagactttcgcagagatggtggcgggccctctgcccttctgcatcatgttctaaaatgcgtcaggggagcagggggtacatgctccttacaagaccaggccttgccagggctctcagttggagcctgttttggggtttggccctgagcgccccagttattttcactcttctcgcacaaagctgggtagagaggtcagctgaggaccagaacctggccatcagccttgggcagctaccctcaccagggtctggggggcctctgtgtcctgatgaccccaccccatctacactacactacacttggggcaccccatcgccctctcacacaggaggatggaaaggcgcccgctaggcattttggcatccccaacaaatgagacttgttttttccctaaagcggtttcattcaggaccgcaggggcaggagggctgctgcgtgggccgtcctcctctgcaatgctataaagtggcccaatgcccctctttccctgccactctctggatctacccttagccccttgccctgaaccccatccaccctggcccctctgcctcctggccatcgccccagagctctccccagcacatcaagcatgagtccagcatcacttcctggtcccccgcctccccggcgcctctcacaggcttctcctcggcacctccagttttccagttgctcaggccaaaaccttagcaccattcttgattttttttttcctattcctttcacactccacattcagttcatcagcaaaccctgtcagctctgccttcaaaatatgcccagagtcccctctgctgccaccagcccatccgcgccactgtcttccccgcctgccctgttccaggtttctcctgggatcccccagcttctgcgtttatgaccccttggtctgttttcaatgcagcagccagaggggtctggtcagaacctagttcagatgctctttctcctctgggcagagccctccttggctcccacctactcagggtagaggccccgacagccacctcagggtcccagtgatccttcccttctctctgaaccctctcagcctcctggtctcccctcagtcactgtcctccagccacagcttctcaagcagtcagccacacctgacatgcacccactcacagtgctttgcacttctttccttttctcaaaacttctacacgtctgcactttcctcgtgtctgtgttccaatgctgcctcctcaaagaagccttccttgactaccccatgcctcctgttcatcccagttttttcccaccagtgcccccatcaccactgaacaccactgactgtgtattctgcccatttgtctcattgattgtctcgtttctaaaatgccagctctcaggctgggcgtggtggctcacgccagtaattctaacactttgggaggctgaggcgggtggatcacttgaggtcaggagtttgagactagcctagccaacatggtgaaaccccatctctactaaaaatacaaaaattagctggatgtggtggcgcaagcctgtaatctcagctactcgggaggctgaggcaggagaaccactggaaccagggaggtggaggttgcagtgagccgagatcacaccactacactctgtcgcttgggtgacagaatgagactctatctcaaaaataaataaataaaatgccagctccctggaagcagcggcctctgttctgtgccctcgcgggttgccaggcctagagagtgcccaccccatcgtaggtgctcaggagaccttcccaggatgactggtgactaagtctccacattctgtccccgccagcagcccacccccatctcttccacactcctttctcctctcccgtttctctcctctccacccccactcccaccatctcagcctttcctcctctttcttctcagcctctctgcacacacagggaagagaagactgaaattattcccgggatgccgtccctgggcccctggtgcagctgtccctgccttcacaatggcagccttctctttgcttggctcttctcctgggtttgctccctgctctcttcctctctccttgagtgcacacaagtgtgcacgcacgcacgcacacacacagctcccttcttccctcggtccagctgcctctcatctgcccatcttccctccccctctccggcctgtggggggacagcagagcctctccattcaccccgtggagtgtatccactgctcacagcaggtagccttcctgtctctctgcagcgaacacccagccttccccactgtggggatccgagtatccacgggaattgcacagcccctcctgggacccaggctgacccagcgtgtcctcgagaggcacggatttgccgcctccgtgcacatcttcaagcgaaatttcttcctctaatttgatagtcacttcctttctctaagacctcagatttcaaaataagtgaagcacttgttttgagcaagagtctaaagaattagactccgccttaagcgcccttgtgaccttgagctgagacctcatcccctctgggcgtcagtctctccatctgtgcagcagtgttgtgacatctaagcactagtcacccagtgcctgtgataagacgccaccctgagtgatacgtgacctgtgcccacaaacccaggaggagaggttccctgcgccgtaagaggaagtggccacggggaaagaggaagctgatgtgaggccgatggggcagggtttccgattgtttccaggcgacaccctctctgtcccacccccttagcaggtgtatccacttccctagtggaccacagactgggtggcttagaacaaaaggcgattttcacagttccgggagccagaaccccaaaatcaagcatcatcagggccacgctttccctgcaggcttcaggggagggtcctttgcccttgagttcctgggggttgctgggaatcttggcaccccttggcttgtggccacatcactccagcctctgccttcatcttcatgcggcctcctccctgtgggtccctctcttcccgtggcctgctcctctctgaatcagtgtccaaatttccctcttctgtcaggacaccagtgattggactagagcccgctctgatccagcgtaacttcatcttacaacaccatgttacaaacacggtcaccctcacaggtacctgggcaaggacttgagcatatattttggggaacacattcatctcgtgacggctggtttctttcacacattaaaccccgcccccccccataaaggctgcagagccgatgtcaaactgagcaaacctgccgctcttcccctcttcactgccccagctgtggtcctgggtggggagcagtgtggccgccctgaagatcagctccatgcgtagccttcccttcccaaccatggtttctctcaaggaatctccacctgcagtgggcgttgaaacagctgcagggtcaaaagtgagggaagggtgactgtggtgacagacaggcacaccctgtctcctgggcctcaagaggcttccgggggtttcagagtgcatgagaccttttgtagtcctctcctaggtgctagctgtgactccctgaacattctggaatgagttaggctggagccaaatggcccagtaccgttgccactagccacagggagctatttaactttacgttaattacaattagcatttcagtttctcaggtgcactagccatggttcaggtattcagtaggcgcacatgggttctgtactggataatgcacatagagaatgtttccattggcacagaaaggactcttggacagcaggagaatagagcctatggctgggcctgtaatcccggcacttggaaaggtcgaggcaggaggatctcttgaggccaggagtttgagaccagcctgggcaacatagtaagacctgtatctttacaaaaaatttgaaaaaaaaaaaattagctggacatggtagtccatgcttgtagtcccagctacttgggaggctgaggcaggaggatcacttgagcctaggagtttgaggctgcagtaagccatgatcacaccactgtacttcggcctgggcaacagagtgagaccttgtctctaaaaaagaaagaagaataaagcctaatcaaacaaaatcttttgggagtggggagtgacacacagcactgagaaggggcaataaaaacgcagggggtggtggctgtcgaactttaggtgagtgctttccgtgattcctcatctgtaatccaatctcctcctcctcatccctgcactcacttccccttatgctcccagtaccttgatctgtcttcccaaaccttcctgggtctcgggtcagggtctcaggacaggttcctgttctccgagcagcagacaccatccatcccggggccagcaggttgtgccagcccacacagcgagtcctttgggaatccatccgtgtcgcaggggatttgagcaaatgaagggaaaccgagttcctacaccgaggccgggagcggggcttcctctgtcatccctgtgtgaacccgttctagcctgggggctccaaatgcatagagggctggcaggtagcccaaagcagagaggcaggctgggtggggagggggtgcccagatttcaactgtggactgttcactctactttttaagaatgagcaactgaaaacaccgggcaggcccacagcaaacacacctgagggatggattggtctgcaggccaccggcttgcaaacttctttctaagctggtggttctcaagggagcacaccgccccctaggggttaaactctgtgactgcattgccggtgatggtgaaggatttgactttgctggcttcctgggggcggagactaagaaggactttgatgtcctgctctgcacagcagagtccacgtggcccccacattgcattgtattccacatagcttctgagtttcctaccacatcactcatatgggtagattattttatgtttattgtcatctgagtcttgaacctacgtctattttatatgtaaatactggagggtttttgcatattcccaggaatgtacggaataagaaaatggaggcaatattatacttgagtgcaaaactttcccaagagtcattccttatttctgaaagtcccatccccgatgacagtgctacgccaaaggatttgaatggcaaatgtcgcccgcccacccagctgcccttgtaattgtcacattcccagtgaatctgtgtctaggtgcaggcgtctgcctgactactgtgttgtgccttcttgatggatgtgctgggggaatttcatattgaaatttatcttcattataaattgctttccttttattttccctgtagattgcagttagagcattatattgattttgtggaaatgacatgcataggtagcttttgttacctataaatttcctttcaagaaaacaagggcgctctacaaaatatttgtcatagaaatgggaggtcagtctgatggcgctgagaacagctctttgaaaggtgcaagtagtgtcagattcctccaaggcgataattaaatatccattgagtgacaggccttgttctgagggtctgttgtggattttctccccctcctctagtccatccctctgaacaaaaccacactttaaaaggcacaagacagatatttaagacacagcttgtcctcgtggtgactcagcaggcaataaaacctgtcactagagatggagccctccatacccagctaattgagtttccagggaatgaatgggcctcatcctcatttgcaggagctgcaagacccttctagggagcggatggctggagccagcatttaattaggcacaggcagcccgccctccatgccaccaacacccagagctccgcctggccctgctacaaccagtcagcagggccttggtgtcccccgcagcccagtcttcctcaatagccacagcctcactaaaaacaggcaggcggaagacaggaatgcatggagtggcaagacagaagcagctctcgcctctcgccctggcgatctgcttgtccctgtttgtccccagcaactggccattccttctccccacccacagccggaggacacttttaaaaattgtaaacctgaccacatcacttccggctgaaaacctcctacggctgcccactgctttttggataaactggcatctcctcgccagggctgccaagaccttgtttggcctgggtgtgctcacctctctgtccacatctcctatctgtcccttccttggtgacagcactcaggctgcctagcctctttgttcctcagaacttccaaggtccattcctgccccaggccctttgtatgtgcagttacctctgtctggagcactggcccacaaccattctggtacaagcaaccggtttcgtggaagacagtttttccacggactgggggtgagggatgttttgggatgattcaagcgcatttcatttagtgtgcactttatttctaatattatcacattataatatgtaatgaaataattatacatctcactataatgtagaatcagtgggagcccgagcttgttttcctgcaaccagatggtctcacccgggggcaatgggagacagtgacagatcatcaggcattagattgtcataaggagtgcacaacctagatcccccgcatgcacagttcacaacggggttcacgctcctatgataatctgctgctgatctgataggaggcagagctcaggcagtgatgcaagtgatgggaagcggctgtaaatacagatgaagtttgctcactcgcctgccactcacctcctgctatgcagcccagttcctaacaggccacagaccgctacctgtctacctgtctgcagcccaggggttggggatccctggtctagagcgttgttcacacactgcggagaacttcctccatccattctctcttccttcctgcccttcctgtgtcggttagtactcctcaaccctctcattctcgaccatgacacccggctttatgttcttcttaggacttctcgcccccttgaaattatcttgcatgtttgtgaacttttttttttttcttttttttgagatggactgtcactctgccacccaggctggagtacagtggcatgatcttgactcactgcaacctccaactcccaggttcaagcaattcccctgcctctgcttcccaagtagctggaactacaggcacccaccactacactcagctaattttcgttttttgttttggtttttttttgagacggagtcttgctctgtcgcccagcctggagtgctgtgccacgatcttggttcactgcagcctccacctcccaggttcaagcgattctcctgcctcagcctcccaagtagctggcattacagttgcatgccaccacaaccggctaattttttacatttttggtagagatggggtttcaccatgttggccaggctggtcttgaactcctgacctcaagtgatccacctgcctcagcctcccaaagtgctgggattacaggcatgagccaccgcacccagccaatttttgtactttagtagagacagggtttcaccatattggccaggctggtctcgaactcctgacctcaagtgatctgcctgcctcggcctcccaaagtgctgggattacaggcgtgagccactgcacctggcgagtgaacttgttttttacatgttttgtttgctgcccatccaaaaatagcaccaggcaggtattgggtactcagtaaagatttgaacaaggccaggcacggtggctcacacgtgtaatcccagcacttcgggaggctgtggtgggaggatcacttgagcccaggagttcaaaaccagcctgggcaacatagagagaccctgtctctacaaataattttaaaaactggccaggcatagtggcacacacctgtggtcccagctctttgagaggctaagatgggaggatcacttaagcccaggcctttaaggccgcagggagccatgatcgtgccactgcattacaacctgggcaagtgaaacctcaactcaaacgaataaaaaaaatgaacagatggagaactcttgggccttaggcttgaagtcagcaaaaaaataaaaacaaaatggaatttagattactatctcatttatccagcatgaagaaacataatcgaaattagttcaggcaaactttgccaggtcccagtgctcaaacgctgtcagaaccctgtctttctgcttcttgcgttttctgtcattgggttggctttattaggaaggttccctctttgtgatggcaagatggcccccacaggtccatctccccagtgtggtgaccccagctgaaagagaggcctctttccaagggctccagcaaaagttccagggaaagctctcattggctcatctagggtcttatgtctctttcacccaatcacagcagccaggcaaaaggagataccctgattgtccaggccaacctcatgggcctggtccaggattcagagctagaaagagcctcatcagaacatgtaaggctgagaaaggggaaagattggttccctccctctttggtgactgaaggcacaattatgaaaagacaggagaatggattctgggcagaaaaataaaacagatatccactatagaaacccacatgcaggccgggcgcagtagctcacgcctgtaatcccagcactttgggaggctgaggcgggtggatcagttgaggtcaggagttcgagaccagcctgaccaacgtggtgaaaccccgtctctactaaaaaaatacaaaattagccaggcgtggtagcgcatgcctgtagtcccaggtactggggaggttgaggtaggagaatctcttgaacccgggaggcagaggttgcagtgagccaagataatgccactgcactgcagtctgggtaacgagtgaaattctgtctcataaaaaaaaaaaaaaatagcttcttcttaaagggcaagtgggaggagagcatttctcccagcccccagctcgctctgcttccaacataagatgcctctttcgtgcggaatcatgaccccaccttcctcatttgttttcacacagctttcagttcagcaagatcccatctctggcatccagaacttttatagcattgatttatcacttcgtgcagtgatttgcatttggtattttttttttcaaaagcagaagaactcgactcaggctgtaaccttgcaaagcagcacaaagttaaaaggatccagttacagaatatcagaaataccccagccctgagagctgtggagctctgggtttatttaatgcatttcttgccagccctgcctcctcagccaatttgtctgccaaaaaaacaaagacttcagtcctgtggcatttcacatctaatatttatgctgttctagagtttgcaaaagggcttccttttcatttatcactgttcctcaggaacctccagctcccctgctaggttaatgggattgttctctgctgcccagaccgggagccccaggaagccaaatgacagatcatgaaagtggcccagtggaggactcttctactggtgtcaggggtaggatcaaaactcagcctgaaccagctcagtttctattttgtgaccctgggggccaaatatggatcttgcaaaatggcagctggcagcctgagtctacacttcaaccccaaatttctgtcagagttacaagatgctttttaaaatctggaaatttaaccaaaaatacccagattacaaacttctctttaaaaaaaaaaaaaaaaagattatgataggcctgtaatcccagcactttgggaggccaaggtgggtggatcacttgaggccaggagttcaagaccagcctggccaacatggtgaaaccctgtctctactaaaaatacaaaagaattagccgggcgtggtggtgtgcacctgtactcccaactactcaggaggctaaggtgggagaatcacttgaaccaggaggcagtggttgcagtgagccaagatcatgtcactgcactccagcctgggtggcaaagtgagaccctgtctcaaaaaaaataaaataaaataaaggccaggtgcagtggctcaagcctgtaattccagcactttcagaggccaaagcaggtgaatcatgaggtcaggagatcgagaccatcctggctaacaccgtgaaaccccgtctctaataaaaaatacaagaacaaaattagccggtcgtggtggcaggtgcctgcagtccgagctactcgggaggctgaggtgggagaatggcgtgaacctgggaggtggagcttgcagtgagtgcagtggcactccatcctgggcaacagagcaagactctgtctcaaaaaataaaacaaaaatttgaaaaagataataatgataatgatggtattgccattactggtaacattcctgcatggtggagattagtaaactgtggcctacaggagtctgctgccaggttttacaaagttttctggaacacagccacacccattagtgtatgtactgtctgtagctgctttggctctacggtggcagaattgaatcattgcaatagagaccttatggctgcatagctgaaaacacatagtctggccctttgcagaaatagtttgctgagccctcctaagtggcgccagcccactggatttgtgccacagatacccccaggatttattagaatataggtggagttgagggtacttcagtccctaattaacagcggattagagatgataggtgcttatttctctcccatttgacagtttgggcataaacagcctagagatgatgtggcaggcatggtgttggctcccaggctcctgatgggtgatggtcagatggcgttccatcatcctgggcgatcgtccttatctaaagcagcatcccatcctgtctgcatccaaccagcaggacacagaaactataagggaagctcacttcccttcctggaggggagtttccagaagtcacacaccacctggtgtacccctccagttcatagaaaatacagagaattacaaaggaagccagttatatgaaaacatatttatcaaaatattttataaactgtgatatgtatgcttctttacacataaaatggcacgatgaagcagttatttaatggacaatggataggtctgataacttccatgatttcgaagtagcgctggctcaaatgatattttaagaagtccatgttgactacaatgtgatatgaaaatatccgtaattcccattggtgacaaagtcccagggaccatcattcataattgaaggggatgctagttataggttaatgaaaataaacaaatacatacttttgccattcaatttcaggaaattatatcttgggacaacagattaagaacctcttcctcaggtgatctgattcgattccatggcattaagtgccatctaaatgcttacagctcctcagtttgtaattccgtagcttttctgtgaacctggtctgtttccacctgaatgtctaacctgagtctcgaggttaatgtgtctgatttctttatcaacccccatccccaactctgcccctcccagtgtccctttcctaaataagggcaaatctgtcctcctcattgcttggaccaaaaaccttgagttatccttgactctctttacttctttcgcatgccacatcagcaaatcccattggttccacctttaaaaatagcctggaaccaaccacccaagcccttcgcctgccacgattgtggtcatcacagtctgtctcctgaatgactgtgagagtctccaaacattccagttccctgcctcggactggccttaattctaggacagaagctccaggaagatgcaggttttttgctgctttaattttttctgttttgttcactggtatccccagtgcctagagccatcccagccacacaggagtcctcctttaatgtttactgattgaatgaatgaatatataacatcatgatcaataatattatgataaaaacagtaaccatttagaggcagttaacatattttctcattgaatctttcccagcaactttgtcatgtagggatattattattattcctattttgcagttgagaaaactgagctggaaggcagaggtagctgaacttaaatgcaagctgttggctccagagcccatgcccagccctcagacctgcctgcctcggaggataaaaatcatttctgaggccaggccaggtggctcacgcctgtaatcctagcactttgggaggccgaggcaggtggatcacgaggtcaggagatcaagaccatcctaaccaacaaggtgaaatcccatctctactaaaaatacaaaaaattagctgggcatggtggtggcgcatgcctgtaatcccagctactcgggaggctgaggcaggagaatcgcttgaacctggcaggcggaggtttgcagtgagccgagatcgcagcactgaactccagcctgggtgacagagcgagactccatctcaaaaaaaaaaaaaaaaaattatctctgaaaccctacacttctggaaagactgatctggataacgactatggctcctacctgtgtcccccacctatgcttcaagaaaggcaaagtgcccgggtcctgggaatgaccttccttcaaaagcccacggccggatgaattctgggaggatgcagcatgggaagataacctcagtgtggaaattccctttgcctggaattctggcagaaagcacttcggagatagtctgagccacatcggagaggaggagctctcggaggctgagtcccatttgtgtgtgtccccacctttagccatggggcagtccctctgctgttccctcttccctgcctctctgcgtccccgtggatgggaagagctccagtctgtggtcgctggagtcctgctgagaggctgaacagggtagtcaccaaaaggcaggtggagacagacaacctgggattgagcctcatttcagctctgacacttggcagttgtgggatgttcggtgaaaaggggactttgcctctctgtgcctcagtttctccatctgtaaaatagggaccaaaaaaaggatctacctcactgggatgttgtaggtcatcgtctaaaccagtggctctcaaagcgtggtcccaggatctctagactcaaaactattttcatgataataccaggacactgtttacctttttaccgtcattttccttctggtagacagtggagttttctagcaggtacatagcatatctagttatctaaaaaggattaaaatactcttcccttttccatctgcatacccattttattttattttttagaaatagggtctcgcttgtcacccaggctgaagtgcagtggcacaatcacagctcattgcagcctcgaactcctgggtccaagtgatcctgccacctcagcctctcgagtagctgggaatacaggcacacaccaccacgactggctatatttatatatatttattttttagtttttgtagagatgaggtctcactttgtcacgcaggctggtctcaaactttttgcttcaagcaatcctcctgccttggcctcccgaagtgctgggattacagacgtgagccactgtccctggcctgcatgtctgtgtgaggctggatttttcatgttaaacaaccaaaacaatatatctcagcagattgaatgccaaaacagatttaagaatcctgctgccttccagtaaacaagacattgaagagattggcaaaaatgtaaaacaatgcaactcttctcattaattgtattttgtttgggaaaaatatagttatttatctttttttctccccaagacagagtcttgctctgtcactcaggctggagtgcagtggtgcaatctcagcttactgcaacctccacctcctgggttcaagcagttctcctgcctcagcctcccaagtagctgggattacaggcgcccgccaccacacccggctaatttttgtatttttagtagagacagggtttcaccacattggccaggctggtcctgaactcctgaccacataagtcatcacgcccagcctctatttatcattttttaaatgtatgctaacaagtagtgagtttattatttaaatgagtgaacaaatatgttttaaatttctcagttttcatctctaatataataactatcactagatataaccaacatacacaggactctgggttccttaataaattttgaccatattgaaaagcactgctgttgccttacactgaccttgagtgcttttttggttttataaagcacatccacaaatggaagtcatgtcccgtgtgggccaaatagatccaagttcagccagccaaacaccatacaagcaaataggaagacaagaatttaacaattctacccactcctccactcacagagggtgtgcaccggatgataaaaaaacaaatctacgttctcagccaggcgcagtggctcacgcctgtaatcccagcactttgggaggccaaggcgggtggatcacttgaggtcagctcaagaccagcctggccaacatggtgaaaccctgtctctactaacaatacaaaaattagccaggcatggtggcgaacacctgtaatcccagccagtcgggaggctgaggcaagagaatcactggaacccgggaggcagaggttgcagtgagccgagatcgtgccattgcgccccagcctgggtgacagtgtgggactccatctcaaaaaaaaaaaaaaaaatcgacattccctcactcagctgtgtctcccacaggcctcccattacgaggtgttcgttggttcagttgtttacccatttattccacaaacgttcatcgaggtctcgtcactgaccaagctctgttctagatgtgaggacacaggggacaagggactcagaaagccgctgccctcatggggctggtactctggtgggagaagcacgtgataaaaactagaagacagataaatatgaccagtgaataaatatgtggagaagcaatgtcgggggaaaggggagagcctgggcggtgtggggagatgccatttgaataggagggttaggattgagccccagtaagttaacatttgaggctggacatggtgactcacacctgtaatcccagaactgagagaggccaaggtgggcagatcgcttgagcccaggcattgagaccagcctgggcaacataatgaaaccctgtctctacaaaaaaaaaaaaaaaaaaatacaaaagttatctgggcatggtggcttgtgcctgtggtcccagctacttggaaggctgaggtgggaggatagcttgagcctggggaggttgagggtacagtgagccacgaccgcaccactgcactccagcctgggtgacagagtgcgaccctgtattggaaaaaaattaaaagctttgagcaaatagctgggaaaggtgaggaagcagcccatgcaggtatctgaggaaggtgatttctttcaggtaacagcaagggcaaaggccctggggcaggtatgagctttggggttggggtgctggtaggatagagggagaccccaggacaggaggctggggggaaagtgggggcagatgcagtcacggagcaggacaggagacagttataggactttgtagggcatggcaaggactttggattttagttgaggtggatgtggagccactgaagggctttgcacagagtggggggcttgatcaaatttgtgatttaatgggatccttctggctgctgtggaagatgggctgaaggtggaggcaggaggaccagggacgaggttccagcaaggtccaggcagaggcagtggtggcttggaccaagatggtgacaggcggatgatgggaagtggtcagacctggatgtgtcctgagggtgaagctgctgggacatatgtgagggaggacagaggagctgaagtcccctccatggtgcgtagccttgacccactggcattgacggatgtatggatcacagggcgaaaatcaagaggccggtgtgaagtgctgatttgacaccaaatgaagtgatttgaaggaaattactaagtatgcagcggtccaaatgatacataaaaacggccaaacgtgtgtgagaggcacgcggacaactggaattgagatgatgccacgaagggcaaagaccccgttttgttttcgcagactccgtgcctgcgaaatggcgcgggtctgttttgggaaggacggactttccacaggcttctgcttcatctttcgccgacctctctgaattgctttggcaaacactgtttattgtcattggctcggctccgcgctccagcccatctctgctgatagatgtgtgtcatgctcagccgacttcactgtgcggcatgaacactcctccccaagctcattactggagtctcggaggggccttgccattttccaaaacggtgtcacatctggtttctaacaaccatttttatttctccagaggtccaagttttcatccccctccctgaaaacggaaagcagactgtattttgggaactcacagttcttttttgtttctgtttttttgttttttattattttttttttttcagagacagaatctcactccgttgcccaggctggagtgcagtggcacaatcatggctcactgcagacctaaactcctgggctcaagtgatcctcctactttggcctcccaaagtgcttggattacaggcatgagccaccacgcctggccctttttcagagttctttatgcacaatctcatttgttgctgcccccatttttatagaagaattcactgaggctcagacaggagcactcgcttgcccaaggagtcagagtcctctgactctgcaaaccaagctctttaaagccacactgcaaccctgtcgttaatggtacatttggacaactttttaaactgtgcactttacacagagtttcacaacctcggcactggtgacactttggggctggatcattctttacggggggaggagggccatcccatgcactggaagatggtcagcagcatccctggcctctgcccgatagatgcctgtagcacattcccccaccccgccaggtcatagcagtgaaaaatgtctccacacactgcccagtgtcccctgcagggcaaaatcacccctggttcagtgtattctgcacacagatgtgcttcaggttggcagccctgcctgctccgttgacccatttttttcagcatgtagcactgtgctgcagacactataatagaaatcccttcctttctttttctccccccacccctgccccccagacagggtctggctctgttacccaggctggagtgcagtggcaggatcttggtccactgcagcctccgcctccacttcctgggctcaagcgattctcccaccccagcctcccaagtagctggaacgacaggcgtgcagcaccacacctggctaattttttggttttttggtagagacagggcttctccgtgttgcccaggctggcctcaaactcctgagctcaagcaatctgcccatcttggcctcccaaagtgctgggattacaggcgtgagccaccacaccaggcctagaatccctttcagtaagacatgcagttgccacctctcctgcactcctgggcgaggggtgtgacgcttaacattagagggcgctgccccaccttgcacagctgtgtacctcaatcaggtgcacctacccagccctcctgtcggccactgctcaccgtgtgcacactctgggccaggtactgcgctggggctacagtgcagcacggctcctgccttacggaccccacaccctagttggggaaatgaggataaacaagaaaacaaatgcatctataggataatttcagagagtgcagagtgctgtagaggaaataaacagcccggtgactatagagggatgggtgaccagggacaacttctcatctgacctgaggtgccacggtgaggaggaggcaggcgtcccaggcagaaggaagagcaggtgccaatgctcggtggggtagagagcttggctcctagggagcgtgagacctagagaagttgaaacagagtgagctcagcagtgcgtccctgaagggagacggcctgatggctcttggactcagaagggccctctggccatttggggaagtctgggctctgggaaggctgcggaggcagaagtccagttggaagttggctgtgagaaggaaacaggtgaagaagcaagatgcatttctgtcttttttgggattttatatcctgtgtatatgtgtatgttgtgtattcgtgtatgtgtgtatatgtgcttttactgtattttcctgcatcgtgtatatgtacatatgtacctgtatattcatgcattgtgtatatgtgaatgttgtatatctatgcatgtgcgtatgtgtgccatatattaatgcatatgtgtatttttatatgtcatgtattcactcgtgtgtatatgtgtgttgtatattcatgtatgtatatgtagtgtatttgtgcttgtgtatatgtattcatgcatgtgtgtatatgtatgtgttgtatatttatgcaggtgcgtagatgtgtttgtgtgctggttccaaaatatgaggacaaattgccaaatcaaagtgaataaatatttaatgaaatggtgttgcatgattcagcgagtcagctctggaacatttggactcttagagagctgtttgtcgattacctttaatgtagtgtgtgggtggaaatggtgtgggatgaacatgtaccgaaagttgctgatgtccttaaagaagccctgttggtatttccagccagatggcccgtcgtgggggagagaaagtcctccgaaagcagcgggtgctttctgtcctgctggctgcctcttgggaggcccctaggacagatcaggtcctgtttcacccttcgcatgcctgtcagttcatccacgtgcatagcagtgggtgggggtgcactgtcgtttcattgccaacaaccacaggggacaaagtcctttgtggtcccacagctaggaggtggcagatccaggattcaaacccagacagtctgactgcagagacgctttgggcactctgccacattaccacctgtgttactgggaaaagggagaactgatgctgggaggaacagcgtgttcctacgccggcccggcatggcggggacatgtctgcagcagggagaggtggccgaggttcccagtggtttctggttgcaggagccctctgtctcccccattgtccgtggcttgcttagtatccccagtgatgccgtgtgtgcccctgtgccaggtttttcaccagctaatctcagtccctggtcgccacgagacacagctttcacagaccacaaatgcaattattacaaggcaatttcagttagatttggggctgggagagaaaacagaagggtctcctcctcccatcaggctccgaatcgttccccaggagcacttaactcagacaaatggggaagcagccgcgtggagcctccaccgtagagctgcctgcaggggaagtggccgacctgctgggccacgaagcagggtgcaggaaggatatggggagctagtgatcctctccaagggggcagggggactccattaaaccagatgttaacagcaagaagttggctataacaggggacgggcccattggtggataatgaaaatataacccttagtaggcacttgctatgtgccagttccaagcaatgtacagtcgtgtgtcacgtaacaatggggatacatgctgagaaacgtgtcgttaggtgattctgtcattgtgcgaacatcatggagtgcattacacgcctggatggcatagcctactacacacctaggctctgtggcgtgacctattactcctaggctacaaacccccctacagcatgtgaccatactgaatcctgtaggcggtggtaacacaatgggaagtatttgtgtatctaaacatacgtgaacatgttaatagagtacagtaaaaatatggtgggcatggtggctcatgcgtgtattcccagcaccttgggaggccaaggcgggaggatcacttgagcccaggagttccagaccagcgtgagcaacatagtgacaccccatctctactaaaaattaaaacattaggctgggcacggtggctcacgcctgtaattctggcactttgggaggctgaggcgggcagatcacctcaggtcaggagttcaaggccagcctggccaacatggtgaaacctggtctctactaaaaattaaaaaattagctgggcgtggtgttggacacctgtagtcccagctactcgagaggctgaggcgggagaatcgcttgaactcaggaggcagaggttgcagtgagctgagatcatgccactgcactccagcctgggagacagagtgagactccatctcaaaaaaaaaaaaaaaaagtggtttcaggtaagagtggatccccagggcctcaaaccagcatctctctatctctctatctcttgtatctctctatctcttctgtctctctgtctctatctttcccacctccgcatttttccatattgctttacacacacacacacagactcttccctcttggtggcaagatggctgccagcagcttcagttatgtatcccaccagttccaagccttgaggaagaagaccttctcttttctagtagctccctaaaaatcccagggctgactcgctgcagttggcccagcttgggtcacatgcctttgcctcaactaaccagtttgtgcatgatcaccaggggaatgcggtcctcatgggagtcaaggatttgcacacattcctggagtcaacagtcaaggtcagcccgtgcaacttaaataaggaagtgttggtgcccaaaggatgacagagccaggcaggtgaagcttccacctagtgctgggcacacaggaggcagtaagtgctctggcctttcagcagatgccagccctgctgcccaggggcagtcgccagccagctcattgtcaatggcctttcctggcctgccattaattcctcttaatctgcctgccaaattttcccacccccacgccagcccccagcttgcccctcctcttgtgctgtccttgcctcgaaagctcagcgaatccaagcttcccaggcaccagccacctgccacaatttgggctgggcttttaatcttggttttaattccagctcattctcttggctgtatctcccagcccaggagccccggggcccatgctaatttgcttctcccacctccactggtgccggaataaccatttttaaaagtgccttggggaaatataatcaaatgagagcaaaatctaatttggcactaaaagcctctgactgaagccctgttttctagggcctggtggagactgaataatacaccctttttgggtttttaagggttgggggttggagaaaggaaagagacgtgaaaggggagatgctagcagaggaaacagcttgcattaagctgacatccgtggcactgaaaagaatgggcaggaggaggacccccacccactccctatgaagaaattcatatcccagcagccaagccaagaagctaaactccagcattcatcagaaagaccttggcccaagtcttcaagaaccagtaggttcactggctggagatttggaagatgtgggagtgtagcgggaaacccagttccccagtggggagttcagtgaagcctttttctctgactttcagttcacttttctgcaaactgagggggtgaaaatctgtgcttcttaaatgacttgtgatctgggctcctttcagaatgtgtcaaaagctgtggacttgtttccaggaaaatgcacaaaaggcaaaatctggcatgcaatgttccaggagcggtacgaaccctgccactcctcatgacagtctccaggaccctatgggatctgtcccctcttccccgtgatgtcatttcctccctccctcactgtcccccttgggttctgcgatgcccccacgtttgtactggcttcagggactttgtacctgccaattccctctgcctggaacagttttcctcctatcccctctgactcttgctcttcagcccagcgaggcctctcacagcactgcgtggggccactctgtcctatcattctcctttattttcttcatcgcatttgtcatcattccccactagaacatcaactgcacgagggcagaagggatcctggtggtcttgttcactcctgtgattccagtgcctgggaagctccctgcataccgtaggtgtttaatcaacacttgccgaatggatacaggcatgcataccttccctagggcagtgggaccccaaattcagcaatttcgagtgccaccatcatgaggtgtaccatgcccaggtacactgattctgttaacattttaccctagattgtttcactctggacttcagttgtttcaaaaggaatcttttacatcactgacagtattgtttgccacgagtagaaagtgtcggggctctgtaggggtgtaacaaaaacgcaggtaataagagcgagatctggtataaagaaagtgattttttattccaaagctagcttaggggaagaagtacagtcttcctgccttaagggtactgctttgcttttaggagcagaaaggagttgctttttaaaagggggcctggcatgaatggcacacaggggaggaattgagtgctgggggggtccgcatatctcactcgagtacttcatctaccgggaagtcagctggcagccactggtgcctttgtgggtggaactaggttgtaagggtggccagaagctctccacctgggagggagtttcgcagcaggcatactttgggttgtagtggaccattgtctctcgaggcaacctcccagtgagtgagagttccgctccagagcctctaagcacgtgattagatgaacttgccctgaagagagtgtctggtgtaggggagataaaaggttataattgcatttctaaagggcgaagtggggcacggggaaaatggagaaaaaagaagaataaaaaataataaaactgccggacagggtggctcacacctgtaatcccagcactttgggaggctgagatgggtggatcacctgaggtcaggagttaaagaccaccttggccaacatggtgaaaccctatctctactaaaaatacaaaaattagccaggtgtggtggccatgcctgtaatcccagctactcaggaggctgaggcacaagaattacttgaacctgggaggcagaggttgcagtgagctgagattacaccactgccctccagactgggtgacaagagcaagactccatctcaaaaaataataataataataataaaactcatctttttcttagaaaaaatgggaataccgatttatgtgggggcttattaaattttaccctcttccttgttgaggtcctgagccgattaagaaatcagacccaagagtcagctgatgaaagtcaacactgcactctgatgaatctggtgaaggctgggtttgagggcatggcttccttctgagagcatttgggcttcctgactaaactccagagtgtgacagacttcccactgatgcaggtccacacctctcctccccgcgcagacaggacaagcctcctgaaaactagccctccccgggggcagctcagtccccagaggaaaagcaagggaagggattgggctatgcatgcccacttcggcccttcaaatccactaggcacatgctaggggtcagcaaaccacagccaatggacctaaccaggccctccatttgttttagtaaataaagttttattggaacatacccgcccacttgtttatgtcttgtctgtgacttcttttttttctttctaacaatagggtttagcagttgtcacagagaccctttgaccctctggcccacaaagcctaaaatactgactatctggcttttacaggaaaggtttggtgacctctgctgtatattgtccccctcggaggaggtacgggagagcatggagagaggccaggagtgttacagaagtggagcccccccgcatggagggcagcgttagaggtgggggtcaaggtcacaaggtttaggaaatcttgtttcctgaactacacttggtctccaggggccttcctggctctcacaatatggctccaaagacctgaggggtgagatgctggagggttggaccataggcaggtttatttaaataagatagggtttctcagcgacgtatggtggctcacatctgtagtcccagaactttgggaggccgaggcaggtggatcacttgaggtcaggagttcgagaccagcctggccaacatgatgaaacctcatctctactaaaaatacaaaaattagccgggcatcatggtgcacgcttgtagtcccagctactcgggatgctgaggcaggagaatcccttggacccaggaggcaaaggttgctgtgaggcgacatcacgccattgcactccagcctggaaaacagcgagaccctctctcaaaaaaaaaaaaaagaaaagaaaagaaaaggtttcttggattaggcgctgctgacattttgtcctggctcagtctttgtagcgtgggggctgtcacgtgcgtcggcgaatattgagcagcatccttggcctccacccaccagatatcaacagcacaccaagttgtgatgaaaccaaaaatgtctccagacattgccaagtgtctcctggggacagaaattaccccctttctggccaagagccactgctttgaggagctggatgcattgaggcatctccaacattccaggtcccagagaaagagaagtgcaggcctttagcttgcccgggaatctcatgctgcctccactccatcagttactccctgacacctagccagggacgcccagtcgctgtttaattaggcacccaccacctaattacatttcactctgtgaaaactggatatgactcagactcagagactgcagccggttccccgcctcctcctctgcagaacgccaggttcttcccgtttatttttgctccatcctcccacacaaagggaggttccatcccggaccttacccctgaggctgctgggggatcctcccttcctattttcacctcccctgtgtacccagacccttacaggaggtgtttcatcagctcctccctctggagcggtcacctcccggccctgcatgatgggcaagtcatttaatgaagtgctcccctttgccttgtattttgggggtttcagaatccagccgcttgggttcctaaggggttttcccactcctggaaagtgtcagccatctgccaggtcaccaggaaaaccgctgcagagggagccagctccatcacagctcccccagggccaggtggctctgtgctttctccaaggacactggtggataggttgtcctctcctctaggggcaccagagccccatcccacccactctcctccttcctctgggggttcacctccctggcctttctctcttcatcctggcttctcggccaagcactcacgtgcacaaggcccagcgctgagctgtctgttagcaagatctccttacatccctacaacctcctggaacgctcatattctgtgctctcagcaatactcgtcagaaatttcagaaccgcagtgtcctcatctagaaagagacgactagaataggattgctgtctctagactcaaattttcccatttcttaaatatggctttatagattataattattaaaaattatacatgcaagccagacacggtggctctcgcctgtcatctcagcaccttgggaggctgaggcaggcagatcgcttgagctcaggagttcaagaacagcctgtgcagcatggcgagaccccttctctacaaaaactacaaaaataagccaggcatggtggcatgcgcctgtagtcccagctactcgggaggatgaggtgggaggatcacttgagcctgggaggttgaggctgcagtgagccgtgatggtgccactacactccagcctgggtggcagagtgtgacgtgtctcaaagaaaaaaaaaatgtacatgcaaaataaaaacagaagaggatcatgaagaggtcttgtctgtctccttatcacagagcttttaggcacatccccttcctgatgaattagggtgattttctttaagctttgttgttgatgtaaagcgtgcatgtggaaaagtgcatggctcccaaatctccaggccaatgaggtgtcaccaactgaaccacctgctccagcaagaaatagaacaagatcatcacccgagaaactccccttgctgctcccagccaccctcccccagtctccaggatacccactgtttttattctaacatcatagattagtttggcctgttctcaaatttcacatagatgacgtcatatggcatgtattcttttgtatctggtttatctctcttaacattcttaggttgttgagatgcatccctgttcttgaatgtagcactaggtctttcgttcaagtttcaatgtagccttccgttctgtaaatatgcaacaatttctttacccatccttttgttgataaacatttcatttgtttctacctatttactattacaaatgtgctgtcatgtcttgtacctgagtttaggtgagtgtatgaatacttttctgttgggtaaatacccaagatttaaattgttgggtagaagttaccaatgcattcaaatttagcagacacagccaaagagttccccaccgtggttggaccggttggggcagccactcagtgtgtgagggctcaagttgtcccacatccccacccatactaggtgttgcccatttctttaatgttagccattctggttgctgtatagcagacagaatccaagggatccacaaacttcaatgggaaaaaaagtgacactctggttttcactaacctacagctgagacttagcatttgcttccaatatgagcataagccataaaccacagtatgttggcagaatctgtagctttgtcatctgtagaaatcaccagtatttaatatcccattgcagtttttgcagatactgcaaaatataatattttcactcataactattctgaaatgatcgctctctacaaggttttaaaagacacagtaggccaggtatggtggctcacgcctgtaatcccaacactttggtcaggagttcaagaccagcccggccaacatggtgaaaccctgtctctactaaaaatacaaaaaattagccaggcatggtggcagacgcctgtaatcccagctgaggattactcgggaggctgaggcaggagaattgcttgaaacctgggaggcagaggttgcaatgagccaagatcgtaccattgcactccagcctgggtaacagagcaagactccatctcaaaaataaaaaataaaagacacactgtatcgcaaatgtgtttagtattttgataaccgtatttccaaacaattgattttctctgtaatcctatatcttgtattcaatgcacgtaataacattggagaagggatccattgctctgtgtgccagagggctccatggcagagcaggtgtgcatgctcaggcctcggacacacaatagtttaataaacatcgtcaggcactttctcacgtggcctcctgatccatctccctccgcagctttcttcgggaagtatcttaatgaatacaacggctcctacgtgccacccggctggaaggagtgggtcggactccttaaaaactcccgcttttataactacacgctgtgtcggaacggggtgaaagagaagcacggctccgactactccaaggtaagctgcaacctttccagcctgggagtggctgtgtggcccagcagttagaggcccaactcaggagccagactacttgggttcagattgtgactcaggcacttaaaagtgtgaccttgagcattttacatacacctcctcctcagtttttcatctctcagccagggacagtggctcacgcctgtaatcccagcactttgggaggctaaggcaggtgaatcacttgagtccaggagttcaagaccagcctgggcaacatgacgagaccctgtctgtacgaaaaaaatacaaaacttagccgggtgtggtggcacatgcctgtggacccagctactagagaggctgaaatgggaggattgcttaagcccgggagtttgaggctgcagtgagccaggatcttcccactgctcttcggcctaggtgacggagcaagactctgtctttaaaaaagaaaagaaaaatgtattcatttctcaaaaaatagtgtctgtttccaagagtttggttttttaacattttgccgagacagaatattcttacagaaagtacatacacagagtgtaccattcaaaggcttgccgcacactgaacggacatgtgtaatgagcacccgggtaggccaagaagagaatgtcaccaccgcccgcagcagtcccctcacggaattcccccgactcgacacccctcccgcgaggataacgatgattcagactcttagcgttacagattcactctgcatctggcttctcctgcttagtattatgttgagttcattcttgctgcccagcattccatcatgcgcttataccacaatttgtttatttcttctacttttattgggcatttaggtatttccagtttggggttattacaaatagcgctgctgagcactgtctagaacctagctcctggtgagcatagaggctcatttctgttatacccgttcctcacagcagcgttgctgagcacagggcgtgtgcatgttcggagtgagtgggtgctgcctgagcacctgcagcagtggttgatcctcagtcgtagttttttctgtttttaacataagatgaattgacatgaggtaacatgcacagatcttaagtggaccgctggatgaattttcacatacgtgtgcatctgtttcaccgcgcatctcttccacatatgcgtgcatccatttcaccgcggctccgatcaagacatagagcacttccagaagactccctgagacccctctccagtcatgaccccccaccctggggatgacgtctactctgacttctgacagcgtggattatttttgcctattctagaacttcacctaaatggaatcgtatagtctgttctcttctgcatctgccttttttcacccagcgcaatgtctgtgagatctgtattatttattcattcaacaactcatggacattttggttgtctccagtttgggtctattataaactaagctgccgtgaacatctttgtccatggcttttagtggacatatgcacccatttcttttggttatacacccaaagaaggattgctgggacataggatgtgttaagatgttgcgcccggccaggcgcagtggctcacacctgtaatcccagtactttgggagactgaggcgggtggatcactttaggtcaggagttcgaggccagcctggccaacatggtgaaaccccgtctccactaagaatacaaaaattagccctgcgtggtggcgggcgcctgtaatcccagttactcgggaggctgaggcaggagaatggtgtgaacccgggaggcagaggttgcagtgagccgagatcacatcactgctctccagcctgggagacagagcgagactccatctcaaaaaagaaaaaaaaaaaaaaaaaaagatgttgcaccagtttacactccagccggaaatgggagttgccctgcatcccttatcagcacttggtgttgtcttttttgtcagggctgctttgttgggcatgtagcggtgtttcattatggttttaccacaaaggtttttgaggatcacgtgagttagtacatgtagaacattagaagcgccccttgcacgtagtaaatactcagtatgtagtagcttagatcagggcaacaaatattttctgtaaagggccagatactaaatattttaggctttacaaggcttacagtcctgttaccactgcagaagtctgccgttatagtgtgaaagcagccatagataatatacaaacaagcatggccatgctctaaggaagctttgtttacaaaaacaggcagtcgacctgcttggctgtagtttgctgacccctggcttagatgatgaggaggagaaggaggagaggctgacagtgatgtttcatccagatgtcccattttaaaagaaatatggaaatgaacaaatcttcctgccccatctgaatcctcagagtcagctctgacatccccccacagctggtacattctttccccagaccagctgccaaatccatccctctttctcttttcccatccccactgccaccagtcctgggccctgcctactgtgacttcccaggttaaagtcactagagaacaggcagtcactgaaagagggtagcaagccaggagtgtgtggacaatagggagtggtggagacggtggagaaggtgtctgtccaaaaggggcagatcaggcccaggtagaactgtgggcccagatggccacttttcctgatttttcaacagaagccacaaatttgtattttttacctatgaaatctcctgattggtaaatattggcaactaattcagacttttctaaaatcttgcatcaattgagcatgcctgacccatgggcctgcagcccttcagcccaccatgtcgttcttctgccagcaccctccggggactgtacggtgagtttcacatttggagtcagtgggatcaagttgagagccccaaccttgacacatattacgtgaccttggacatgctacgtactcctaagagcctcaactcccaaatctgaaaaacaagcatacccttgcatacttaatcatgtgtacttccatttactgagcacctactgtgtacccctgagcacctactatgtagtgctcaggggtacacagtagtacttctgataacatgtagtacttctgatattcacaacaatcatatgaggggagtggactagtcacatttggttccattattcattcaccacccccaacaagtattcattgagagcctgctgtgtaccaggtaccatgccaagtgctggctattccaaggtgaatgaaaacagatgacccaatcatggtcctcctggagctcacagtctggcacatgaagatatgatataaactgttaagtgatgtgcacacatcattaatgcacacacacacagtcacatcacacccgtctattttgtcatccccagtatgagccatttcaacctccaagcttgctagttattacagtcatctcagttttgttttgttttttgagacagagttttgtgcttgttgcccagactggagtgcaatggtatgatcttggcttaccacaacctctgtctcctgggttcatgtgattctcctgcctcagcctcctgagtagctgggattacaggcatgcaccaccacgcccagctaattttgtatttttagtagagatggggtttctccgtgttggtcaggctggtctcgaactcccaatctcaggtgatccacccacctcagcctcccaaagtgctgggattacaggtgtgagccatggcacccagccactatagggtaattttttttaatcagactaggctcttgaagttgtttgtgaacagaaatttaactcccagtggcttaatcaaagaggaaatatattcacctatttaactgaaaaccagctataggggtatcaggcatgggtggatccaggagttcaaatgaacccccaaggagttgatttctctctactgtcagctctgtttttgtctgctcgactgtattcacagaagctctctctcctcctggtagcagtgcggccttccttatatcctcccagcttcctggccagctgcaagcatgggagtctctttcccaggagtcccagagagtctcagtgcatctcattggctctggatcagtcccatgtctgtccctgagccaatcagagtggccaggaggatgcctggttccctggactataagtcacatgctccactcctgagccagacatgggggtagcaggagctctacgctggaacgttggctgggaatagagccccaaataagaatggagtttccaccaggagaaggctgactaggtgctcaacggccaaaaaacactctgtcccacttctgttctggaaaccccggcacacatggagatccctctgcctccgacaggtcatcctgggctccctgtaagtctgatgggtccaggcccaagtggcagaagccgcccccggcctgccctcaagtctcattctgcacatagtaggcctccagcctcccaagtgaattaattccaaagttctgatgaggcagtccggcatggactccttggaatataaattccagtcccagggctaagcacgctgtttccctcctcccagcctcagtgcaggcggattctctaaatatcctgaaaaatacattccctcctttttaaaattcttcaccacatccacgcctcatctcagagcagcccgataatcaagttatcccggggtgctcaggattcttttggggctaagcatggggacatagaacgtccgtccttttgccctgtttcctgcccacacacatctccccctgtgaatgagaacagccctgtgagggaggcgtgagaggattcctggccccccagttaccaggggcctgggaacagagatgctctaacagggacgtgggcagagggcggggcggtgaagtcagaactggctcaggtccagggttcaaatcctgagggtagcagtgggcagcaggagcccaagcgtcaagggaacaggggtgagcccggggtttccagccaaggcagagctcaggagccctgtgccctgggccctagatcaggcagtaagatgcctctggcaaggcagaatgtcactgctggcctcgggcgggccttgttgggaggcccaggcagggaggaagcggcaacccttcgtaagcccccctcagaaggcctctgaggactctgtcccaagtcactaatccacagatgggcacatgccaccaaaggggtccagatgtcaagggcagaaagagaggcagtggtgatgagaaaagagtgatacaggacaagcgctaatggcagaagagggttggagaggggaagacagttgttagtgggaagggaagtgagaatgacctagagttgagtccacccgaaaagaggcttccaggtagctggcaaaagtgggcctgggtgttgggtggctctgcagggaggtgatggcagtgcacggccagtgtgggggcgacctggcagattctatgaacttcatgtgccccgccccttgccgcagcgtgtacacttctctgtctatctggagaagcctcagtcataggcaggagacggcgtgatggagcagctggttgtagctctgtttattactgaaagaaattagcaaagtccaccaatacacgaaataactaaatgaccgtgaagcatccctcctctggaagatcctcggcaaaggatgaggccggtctgccttatgtcctgagcccatcaggcagagtgggaaaagcaagttccagaactcctgaggtccttattcaaatgtcacctcactttagccttcctggaccaccttgtataagggcacccccaccacactccttactgcaacaaatcaccatctggtgcattacaccctgtgtatattactgattcatttgttaagtatctgtctcttctcataagaatataagccccatgaaggcaggaatgctcatttgttttgttcactgctgtatttgtcagatagataaatgaatatgtacagtatgatgtgattaataatataaaaagatgcataaagtgatactataatgtacctaacaaaacactggaaaggttattcccagtaggggacagaagagccaaggttatgggggtgggggggtggtaaggagtaatctaatcaaatgagacttcactgtcctttgtactattttaattttcacaaagaaaatgtaggcatatggttcttgaggaataatgactaacactcatttagacataccatgtaccagatactgtttgaatcattttacacaaattaacccatgcatttctcatcatagtctgtgaggtatatactgtgtctattcccaactgtcagatgagaaaactgaggcccagagaggctaagtaatgtaaccgggccacatagcctagtaagtgataaagcagaattcgaacccaggccatctggcttcaaagtccatgcactaaaccacagcccgtgggcccagactggtggtttttgtatggcccctgagctaagaatggtttttacattttcaactaattgaagaaacaatcaaaagaagagcatttttcacatggtatatacaaaaatgaatgtcattcagcctttaaaaaggaaatccggccaggcgcagtggttcatgcctgtaatcccagcactttgggaggccaaaccaggcggatcacttgaggccaggagttcgagaccagcctggccaacatggggaaaccccatctctactaaaaatacaaaaattagctggacatggtggcacatgcctgtagtccagctacttgggaggctgaggcaggagaatcgcttgaacccaggaggcagaggctgcagtgagcccaggtagcaccactgcactccagcctggccgacagagcgagactctgtctcaaaataataaaataaggaaatcctatcatatgcagcaacatggatgaaccttgagaacattatgctaagtgaaataaaccagacacagaaggacaaatactgcatgattcccttacatgaggcatctaaattagtcagacaatagcagcaaaaaggagaatggtggttggcagggctgaggggagggggaactggggagttcctgttcaagatgtatgaggtttcagttatgcaagatgaaacagttccagagatctgctgtacaacatggtgcttagagttaacagtactctacttcacagataaaactttgttaaaaagcatacagctcattttttttttaccacaataaagcttttaagagtaattttcatgacatgtgaaaaatacatgaaattaaaactgcatccatacataaagctttactggagcacggacatgcccattcattttcctgatagctgctttcaagctgcaatggcagtaatgagtagttgcaacagagacagggggcctgcagagtctaaaatatttactgtctggccctttacaggaacggtttgtgcatacttgctctaaaccactatgtatgcttctcattaataatgttatctgtggcggggagaaaaagatggacctgacccaaaaatacaaaggccttggctccagctctggatgcatggcttatttgtttggggacctcacttccttatctgtaaaatgggtataatgtccacttgtcaaagttgctgtgacgatcagctgagctaaggtatttgataacatgaagagcctatgatcattcattacgagttgtctggagcctgtggagctgctgccacccacacgcactgccttggccttggagggaagcccggtgcggagtgcccactcgagggaaacacgcttttgcctagggctgaggctggcagtctccgcagacactagctactcagtcggtgaagcttgtggatgcctgcaggaatcacctgaggctcagagggtgcttgccagagggggccggttgcacctcggggtcccagctgtggcttctcagccctgtggagctgtgcaggccagcagcacctgggtagagcctgactcctgggcgccgggttctggaaaatgcacctgggcctgtggacctccacccatctcaccctcctgctcacaggtctgaatttcagagttcttcctcatggcttgacccgggcaccccaaacacagtttgcccatctctgaactcagcctttcccccggcccaggccttctctacccttccctcaactgcccaaaccagagaccaacaggggtgggggtcacccgcccctcccgcaccccacatccacccagtggctgtcctggctgcccctgagcatcgctggatgctgcccccgccaccctggcccaggcctcctgttctctccctcagagagaacagggcatggctgaagccctgtggccggagggatgggtggctcttgttggctggcctggcactaactgcccactggtggagcagggtggcagctttggaggcaggtgtgtcatgtggcattgcggagctagcagagatcggggaagacttagccgaggagtggccactgaggaggatggataaggaggggagctctcagacatggagaaatctgcccagccaccaagacagtcctgattcttagctgaatggtggcagagagctggctgtgcacaggacactatggcaagagcttcacatctattggtgctttaacctgcctgtcagcctcaagaggcaggtactgtaatcaccccccacacactttgaaacattagactgtgggagcccctgacccaccctcctgggtctcattcctgccccggcctgagccctcccctggaggtagccagtatcctggagcttctacccacacatacctttattctttcatcccataggtggatatctcaaacaatgtacgatgctgtgtttgtgtccttagactttttataaatgatatcatatcatacacatccttccacaacctgcttttctcacccgatataacattgtaagatttatccacgtttgatccgtgttcatccacgtagctctgttctttttcactgctttagaatcccattgtatatcttctcctaggaatggaggttaatggtagctttatttttaaaaaagtttaaccacggccaaacaggcatatagttctaagatgaagtagtgaagatgagtctgttatgaagagcaacggtggcttcccaccccaccccactggcgggtggcagcaagtgtccaccactggcggttccatctcattctcatgccatttcctgacttgaccccttcaggccctgactgttgatgtcagggtacagagctttgcaccatttttagatccattgtaaattacctttgtcattttaagaacttttctaatacctttatatcacgttccaaaactatagcagcagctctttgatttatataacatatattatttttatgtaataaattctgtagagcccccttataaaattgtttttactccccaaaattaatccataaataatattcaaggagcaatatataaagaagcaagtaactttctccgcttctctcctcttcccagtcttcaatcagcattttgatatccttccagatttttccttgatgctcaaaaatatatgaggttagagtttggtttctcctcttcaccttcccttccctctgcccccacaaaaaatagaatgtttctgagtttgactctgttgcttgctcttacccttaaccatgtatcttggacaactttacacatgcctttttaatgtctgcacagcattgcatagtatggaagcaatgccaccaggtgtgttggctcatgccttaatacctacactttgggaggctgaggcaggaggattgcttgagaccaggagttgaagatcagcctgggcggccacttgctagctgtatctacttgggctaaccactgttagatactcaagactctgtctgtagagaccctgtctctacaaaataagaataaaaatgaaaaattagctgggtgtggtggcacatgcctatagtcctagctacttagaaggctgaggcaggaggatcacttgagctgaggacctcagggttacactgagctatgattgtgccactgcaccccagcctgacagagcaagaccttgtctctaatatgtatgtgtgtgtataatatatatacatgcatactgttaaacatatatcctcctgctggtcactgcaatgtttttgttttataaacaatattgcagtggccattcttgtgcatatggatatagtggatgagtgtacctgaaagagtgtctgtagatatatgaatacatcatggtatgtatatatgttgtatacttcagggtggaagctgtagacacctcttcacctttttttcttgaaaataatcactttttgaaagtaattgttttgggcagagctgctttctagcagagggtatatttcaagaagtcattaccttgaagaaagattagcagctaaatatttactaaattcaggaagagttgtatgggtgctgtggctcacgcctgtaatcccagcactttgggaggccaaggtgggaggatcacttgagcctgggagatggaggctgcagtgagccatgatttcaccactgcactccagtctaggcaatggagcaagaccattgctccattttttgctccatgaccaaaaaaaaattaaagagtataggcaaacctcaacttcttagctgagcttttaaagcctccagttctggccatttacttttcctccaactcttctctcctcttgcccaatatgtaagtcagttccttattttcctggagacattactgcatccccatcccttttttgtgtgtgtgctgctccttatatcatttctgcattttaccctctgacattttatcctctttccaaggagccagttgccatctgccctctcttctatttttagagcacatggcaagcacattcctgcctcagaccccgttatctctgcctggaactctttcctggatcagtgattctcaatcctgagtacccattagaatcccctggggagttttttaaaagtctgatacctgggccaaaccgcaggccaatccaaccagaatctctgggggtgggcccaggtatcagtaagctctccaggggattctggcaaaatccagtgatacatatcttcctatgcccagctccttctcatcattcaggtctcaactcaaatgtcacctcctcagagaggacctccctgactgccccagctaaaatatgcccctcacctcagctcccagttactctttgttacatctctctgttttatgatatttccttcatctgtcataacttttaactaccttggttctttatttatacatgtgtctgctcctgccccagtgtaggcaccccagggacttagggatatacccaccctgcatgacagtgtccccagagccttgaaaaaacttcagacttaggagccaagactatgtagtgctgggtccaacatttactagctgtgtgccattgggcaatttacttagcttctctgtgccttaatttcctgttctggaaaataaggattatcatcatacgtactttctatagttatgtcagaattaagcgagcaaatacaggtaaacacagaacagtccttggcacatcgtaagcactcaatagtgttagctattattcttttaatatctttttttttttttttgagtcagagtcttgctttgtcacccaggctggagtgcaatcatgcagtcgtggctcactgcagcctccacctcctgtgttcaagcgattctcctgcctcagccttctgagtagctgggctacaggtgtttaccaccacgcctggctaatttttgtatttttagtagagatggtgtttcaccgtgttggccaggctggtctcaaactgacctcaggtgatctgctcacctcagcctcccaaagtgctgggatcacaggtgtgagccatcccacccagcctattttaatatctatctaaagtgatctattgcaattcctgccctgttctccctatccacttctctgctttatgtccaattagcttagcaccatttgcatcatttgtctggcatttcatttattttacttgcttatttcttgtctgtctgctccctagactgtcagctccagaagggcagaaattgttttgttcactattgtgtccccagtgcctagcagggtgcctggcacgtagtggacaccagtatgaatacctggctcctcacctgttctcctgtctctccccaccccccaggattacctcacagacctcatcaccaatgacagcgtgagcttcttccgcacgtccaagaagatgtacccgcacaggccagtcctcatggtcatcagccatgcagccccccacggccctgaggattcagccccacaatattcacgcctcttcccaaacgcatctcagcacatgtaagcctcagcactctgcctgccagaggcactgcttagcatgaagggggagggtcaggctttagcaacagtactgtcaccaccatgacttcactgtgcctcctctctaatcctcctggtttaaagaccccaagaacatactgcttgtccatggtgaaactgggatgcaactccagacagcctgggcaacagaccaaggcaggagaatttttaacttgggatacacggcctcccaccaagaggtgtgtggatggaactgcatagaataggtttccttttaatgccatgtgtattttatttaagacatctaaaaacattcttttgaggagggggtctatagttttaccagactaattatttgccaccatttattgagctgtgggctatgtagcaggtgctgtgctaagcccttggcattattgtccagtccctgaatattcacagtgacccttggtgtaccagttatctattgccatgtaacaaatcatcccagaatctagcaacttaaaacaacaaacacaaattatctcacggtgtctgtgagtcaggaatctgggagtggctgttctgagcttctggcccagggtctcctgaggttgcaatcaaggtgtcagctggggctgcagtcacctgaggcttgactggggctcagtcccatggctgggtcttgccacaggagcctctgtccatagggtgtttgagtgtcctcacagcatgatagctggcctcacccagagcaaatgatcagagagagagtaaggccaagaaggaagccacagtgtcttttacaacctaatctcggaagtggcaccatcactgtgccacattctattggtcacacagaccggtccttctacaatgtggagggtctacgcaggggtgtgaaggccaggaagtagagattatcaagggccatcttggaggctgcctgtcacacttggtattcccattttacagatgaagaaactgaggcacagagaggtaaggtaacttacctgaggtcacccagctctaagtggcagagccaggattcaagtccagccccccacttctgcttcccatgcctctgcccacccctgtagtactctatccagctggctgggaaacttcctggaaagttctcctgcttctctctgcctcagaccaccccctgcttagcagtgactcagcagcccttactgtgacattctggggctgcaaggatggggtggtttggaatctgcctgaatattcagggtgtttggcttcattacaatctgaatacattgccctcctcaagcccctcctgtaattactttttgacagacctcgaagcagctcagagagggtaccgaaggcactgttcaccttcccatcccctgatctctggggaggaggctttgacagaagacgatgagctgcgtcccaggggctgcagcattgctgctgtgcacatctgtctggctccccctccaaacccaagcccactcctctccacccaagaaggccagcctcccccagcagccggcaccccgccctaccgccacttagaactcatccctgcagcgggtggaggccactcagccctgtctaagggagaagccgtgggtgagggaagggacgctttgcttcggcagcatctctaaaagaggtgccggcttcaccccaaacagcagcgagcggtgccggaatttcatgatgaaattgtttggcattgcctgctggtttattttccctttgaaatgaaaattacagaaattgaaaatgagcagtgtctgctcttatgtggagaagccccctttgccttcttaggggcatgtttggaaggctgtctcatctctggagtataatcatttccgaaagaaaccaaaaaagagaaagtcctgcagctaggatgttaaatgatgacagtcaagaaggggtggagaggggacagagccggggcgcacggttagagcactggatctttctgttaggggtctcctatcccatctctcccctagaaagccggcacatgccctttcctggggcaggccttgtgtactctggcaaaagttggtagatggtggtaccatccaccccgcagaccccagggccctgcaccctccccatgcacccccccacacacacagtcacatacatacagacacacacaaagacatgcaaatacacacaggcacacaaagacataccacacaagcagatacacacaatgaaacacacacaagcctgggcaacttagtgagactctgtctctacagaaaatttaaaatcagccaggggtggtggtgcacacctgtagtcccagttactggaaaggctgaagcagaaggatcacttgggcccaagaggtcgaggctgcagtgagctatgattgcgccactacactccagcctgagtgacagagtgagaccctgtctcgaaaaaaaaaaacacacacatgcagacacacaaaaatacacagttacagacacacacaaagacatacacacacgcaaacaaagacataggcagagatacaaagatacacacaggcgtgcccacagacacagcccaccagccctcagagcttcccttcaaagggcgctgattgtggcttcaagggctttggggcgagggatgttggggctgctgctgatggccccagacacacagtggaggggctgtgaggacaccaccatcttcccgccatttccccagcagaagggaagggggatggtcttcttcacgcccttttgtgaacgcaccagatattcctcggatgctggaggaggtgaagttttcagatgtttgttgaacaggcagctgggcccatgggaagatgccgacatcctccctgggggagcctggcttgacacaggcaaccagcaagctggcgtcgaccccaagcaccacccggctctgctgccttctggcctcagtgtccttctccaaaagcgctctctccgagccggggctgcagaaatcatcatcctctgaacagtcacccctcactgttctcgagggccgatgtcagcctaacttctcatggattcagggatgattgctgaaaattgcatcctggaatccgggcccttgggcctgcgggaccaattttcccacacgctcgctgctctgagagcgtctctgtccgactgctgcccccagcagccccctttcagttcctcggtgggagagatctgagaggggagctgagcttgttcctgggaatgttctacatggcgggtcaggccctgagacagcagagccagcccacaggagagcctggccgttctgtaatgaaaggaagcatgggccctgatggattcagtggcatgaggctgcagatcagccaggggctgagaaagccgagtccaggggagccttggagacagtgactcacctcccgccttacatagcaacggtgtccacagctgccaagctaccccagcggcagcgtcacaatttctgccccggacgattgtgatatctgagacgctgctgaagtcccgacgtaccaggccagagggagacatgtctgtgcccctctgaccaggcttgtttttcctcctcttcttcgcgggagctccttgcccccagaacacccactgtgaaaagcagtggaaactcaccctttacttcagccttgactgggaagagaggccagatttgcagggaacctggccttcaagaaccatcaggcccagggcgaggaagcccacgttttgtgaggccttaaacagtgcctcctgtcaatggtgcaccccacccaggagactcccccatgctgcggttttcagtagctcggagccaggggcccggcataaactgaggtgacaaggaggtgctcttggtttgctcacaatgtttcctctggttttggtttaatctcccattgactaaccaggaaatagagaggatcagagaagtttggggacctgcccgctgtctcacggagtgagtgacagacccagtgtacctgacttctgccgtggagtcacccgtgattactaatgacaaagggacacaccaatgataacctctcccaagcagtcatcacgcactggccatggttagaagggttccccttacagcctctccctcagtgctcacaaccttcctgggaactggcactgtctgtattctccttgggtaggaaatgagggaactgatgccttgggaggggactaactggccaaagacagaactggggctcgaaccccagcagctggtatagtcaaccactgccatgatatcatcatagatacctgcttggggtccctccatccctcacatcacaggtgctcagacagaactttgcccaacacactcctgctgcacgattaagcagcatgccaggtgcagtggctcatgcttgtaatgccaaaactttgggaggccaaggtgggtggatcacctgaggtcaggagttcaagaccagcctggccaacatggcaaaaccccatctctactaaaactacaagaattagccaggtgtgttgacacaagcccgtagtcccagctactaaagaggctgaggcaggagaatcacttgaacccaggaggcaaaggctgcagtgagctgagatcccaccactgcactccagcctggaccacagcaagactccatctcaaaacaaagaggccaggtgcagtggctcatgcctgtaatcccaacactttgggaggccaaggtgggcagatgacgaggtcaggagatcgagaccatcctggctaacatggtgaaaccccatttctactaaaaatacaaaaaaattagccaggtgtggtggcacgcgcctgtagtcccagctacttgggaggctgaggcgggagaatcactcatactgggaggtggaggttgcagtgagctgagattgcgcccctgcactccagcctgagcgacagagcgagactgtctcaaaaaataaaaaagaatgtggcatgtcccaaatgtgcacattcaggtgccttcctcacaattctggccttacacataaaactatgacttatttcatttttaaatccatttctattatttcaaactaaaatctattgcaaaaggatattccgtggtcctaccttaaccacaataactgccacctgccattcaccaaaggtaactgccatctaccaataataggtacaaggcacacaaagcaatgctatggaatttgagttgggtactggttcccgatgaaggctctgaacttgactttcttcccttttttcaaaaggaagacgagcaaagtctagagaggtgttaaagaaacactagcaccaaacagactttgccctgagagagccgacaagggactggctgtctcactttgtcactcaaggtcactgaatgctgtgcctcttaggagcttcccaagtgcacacttcacacgtggagaaacgctgaaacagggtttggataagcccctgacatgccaatgtcccctttcccaccaggagatcacacctggccctgggctgcagacacagcacagggtggctgctcatccgggcgggtctggcgggggccaggcagggtccaggctgtccctgggtttgaccgatgtgtatgtccttgcccaccagcacgccgagctacaactacgcgcccaacccggacaaacactggatcatgcgctacacggggcccatgaagcccatccacatggaattcaccaacatgctccagcggaagcgcttgcagaccctcatgtcggtggacgactccatggagacggtaggcgcccgctgcatgcctcttggtgggcgtggctccgaacccccagccaggccagggccgagacctcctggcccttcagggttttcctggaggaatagaaatcaaaggcagaatgaagaggccccatgtgctagacctggggaacagcttggagcaatccagacaaaagcctcttccttcatgaaacattttctagatctgtgttgcccaatacggtaaccatatatgctagttatattttttcctgctatttacatttttgaacacatttattgggatgtaattcacataccatacaattcccccaattaaagtgtgcaattctgtggttttaatatgcccagagttgtataaccatcaccacatccatgttaggacatttttcttaccccaaagagaaacctcacagcccttagatggcccactaaatctccctcacccccagccccagacaactggtgatctctttctgtctctatagatttggtgttctgcacacttcctataaatggaatcgtacacgctgtggccttctgtgcccagcgcctttctttcacttagcgccacgtgttcaagcttcacccctggtgtcgcatgaatcagtccccctcattccctgttattgctgaataatatcgcattgtatgggtattgtcacattttatttagccatggctatttaaactgaatgcagtaacattataaagtcagttcttctgtcacacaagcctcatttcacatgctcagtaggttcgtgtggctggagccaatatgtgtccatatcggacagtgcagacattaacacggccaccaatgcagaaagttctgccacacggcgcccttccagatcgcaagatcctgccataggctgcagcccaagtttcactcattcattcattcacctgacagcattattgagtgccagtgtacgtgggatacagcaggcagggaacaaaatgacaaaagtgtctgccctaatggaggcagcatgccaaggcagggacacagatgatccacagataagtaaaagagatggatgccaagaagggccatgaagaaccgtggaggggagggcgggccaggggtgacaagaggcaggaaggtgcagtgacaaaggggacagcccctgggaaagttgagcaaagacctgaagcaggggagggacggggcctgagatctcaagcgcctgtcaccccgggtcggagacgggccaggcacccagtccccactgtcccttgcctcctcgcccgtgttgcagatttacaacatgctggttgagacgggcgagctggacaacacgtacatcgtatacaccgccgaccacggttaccacatcggccagtttggcctggtgaaagggaaatccatgccatatgagtttgacatcagggtcccgttctacgtgaggggccccaacgtggaagccggctgtctgtaagtgtgtcatcccccagggacccagggaggcccctgggcccagctcagggcttcaaccatgcagcccaaacccaagcccaccctgggtggcacacagttttcgcagatgtaccccagggccagcggaaagcaattatgtcatgcatgttatatccctctgctggggaaggagaggccgggagctgttagcacctgtggaaacaggtgtggtggggccgtatgccaggaaatccagggagctgggctgtatacgtgtgtgcgcgcacatgcatgtcaccagcgggtgggaatggtgcttggatttctgttctgggctgggcagtctttgagcctggaggttgtcagggaggaaccccggaccacagcacaggcagctggttgtcagctgggatcagctgagccaactctgggcagcagcacaaagggaaatgctcttccctcccatccttcctggaggaccacgtgggccgcagccctcagccagccattctcctcgggctaacctttgagttgacatgttctggcagcgaacatgctgcgtctggggcaggggagcggacaggccactgttcccggcagcagcttccttggatcggctgggatattatggaggctggctcaaatgaggtttttgaaaagcagatgtgttgctattaagactgtcatttggtctgccttctgctcatgcccagatgtgggaacacacacccagcactcacacagggctggctgcggaattcctcctgaaaaggcgttgacagtgcagtgtggaattccagactgacatgttcccactgccttggacattttgcgagaattccaggaggcaggctgcatgagttcaaggccagagaaagtgatgactgactgttgaccttatcagatcacgcccgtctttggctcttagcgtccccattggactaagagctgtaataacgacagtccacacgtatggagtgtctactcttcagggcctggtctaagaactacataataattcattgcaagccgggccctgtggctcatgcctgtaatcccagcactttgggaggcccaggtgggcagatcatttgaggtcaggagttcaagaccagcctggccaacatggtgaaaccctgcctctactaaaaatacaaagattagctggacatggtggcgtacacctgtaatcccagcactcaggaggctgaggcaggagaatcgcttgaacctgggaggtggaggttgcagtgagccgagatcatgccactgcactcgtctgggcgacacagtgagactccatctcaaaaacaattaataattcgtttcagcatcacaactgccctgtgacgtggatgctcatagtagccccattttacacccaaggccactgaggcacggagaggttaagttgcctgagtttacagcaagtaagggaaggggctggggcttgaaaccaggcagtctctattcccatctgccacgcctctcagaaacttcaaaccatccctgtgaacagaaagaatctgacccactgagggctctacaaacactgacattgggggtttggtcagcctcggaatctgtgatctgactcatagggcccaaaaccacatcccacatggtcaagaaaaagagagtgctcatgtcaggtttgggaccaaagacacacggtatctgtcagccaggactcctttggttgcaagcagaaatgacctttgaaccagataaggcatgtaagataaaaggaacacagtaactatagttactgaaaagtccatgcacagctccagcctcaggcatggctggatccagcagtcttacaatgccattggaaagctctcatttcttatctctcagtcccacttccgccgaattggcttcattctcaggtgggtttttctccttgtggcagggtcagcagctccagattttcagccatcctgtttaggaagccaaactgctttgaacagaagacctgaggctgactcccactggcctgacttaggtcacgtgtccttccctgaaccattcactgtagccagaggtgacagaaacccttgagtaaccaggctgagtacattgggcaggggactctgaatggggccaggtagttcctacagaattagaagctgtgacacagagcaaggcattggtgctggccaggaaaagcaaccactgtcctccttcccctgagcctgggggagcgggaccactggacaagctcagccccattagctgccggttgctgggttctgcagagcgcccgtcgctcagcagtcttcccagctccctcgcctctggattcagttgtagcgcctcacgctggccttcgagccccccatgacacagccccatcttcagcagctgcacacatgcttggcagcctgcccgacgttcacagggcactggactggggagagatgaggggttaaagatgacggaaaccctaggacccaggccctgccctggtccccagggaactagcggggaaggcactcagatgctctgacgggactgtccaccattcaacaggtcctgggtcctgtgctgggcacaccccttaagtcccttaccctacattgggaatgccatcagccagaaacaagagccaggagaggtggctcatgcctgtaatcccagcactttgggaggctgaggcggatgtatcacctgaggtcaggagttcaagagtagcctggccaacatggtgaaaccccacctctactaaaagtacaaaaattatgggtgtgatggcgcatgcctgtaatcccagctactcgggaggctgaggcatgagaatcgcttgaacccaggaggtggaggttgcagtgagccaggatcatgccaccacactgcatcctgggtgacagagcaagacacctctcaaaaaaagaaacaggagccaggaaaggtggcagatgtatgggaattcacttagccaatatttactgagtagctcctctgtgttctaagggtataagtcctggagatacagaagtgaccacctgagccagccttcctgcagcttagagtctaactgggcaatagacaataagccagagaaataagtaaattatatagcatatgagatggtgataagtcttcaggagaaagataaagcagggagggtggggagggggcgcagttccgaatagggtcctcaggaggggccttgtgttgggtatctgtgctgcagaacaaactgccacaaactcagcagcttaagacaacacacatgtacaaactcacagtgtctgagggtcagaagcctgggcctagccctgcagggtcgtctgcttaggctgaaatcaaggtgccggccagggctgtggtctcatccagaggcttgactggggagcatctgcgtccctgctcatggggcaggtcaagtgcaagcagaggacttgaacccatgcagtctgcctcccagactgctcacagtctagctgctgatttagagtggcttgcttcttcaaagccagcaaggggagaaagaaaccagagccagactgctagcaggatagtagttgactatctcataacacaaccacgggagtgacagcccatcaccttcacaacccactggttggcagcaggtgcaggttggtccacacccaaggtgagggggtcacattaaggtgtgatcaccagggacagggattctggggaccactgaggcctgtcacgggcctccttggtcatagagcaaagaactaaaggggtgagggacggtggcccctgatctccagggaaaggacattccaggcagagaggatggtaaagaagaaggccctgaggctgcactgtgcctgggctgtcaaggaacagcgaggagccagtgtctgccccagaggttcaggggaagggttcaggaagggccaggatttgggctggctgtaaagggggggtcgccttcactcaggaagtggggacaggaagggcaggagggggacagggtgaggctgtcagctcacggcatgagctgagacacagaaactaagggggggcgagcacagagtgggggttcagctgaatctgggccgcagaggggagctgctgaggttgaggtgccagactgcagcttccatacctgcagatgtcagcctcccacaaactgctgcccacctaccgctccccaccccccacgcgaggctgaggcaccaccacctgagtgactgagtccccgatctcctgcctcccccaggaatccccacatcgtcctcaacattgacctggcccccaccatcctggacattgcaggcctggacatacctgcggatatggacgggaaatccatcctcaagctgctggacacggagcggccggtgaatcggtgaggacggagcagggcaggtgttgagggggccgggacattgacctgcgggaactcagagcaaaaccctgtgggtctagaacgtggggtctccaagggtcgggagctggggttctcaggtcccgccatgccaaccacttacctgctgtgggagagaagcatggtcccctctccgagattctgtcttcccatctggaatgtggccaaggtgaccagttggggaccttctctgagctaaaattacccaaagcttgaaatgatagcagcagtgatggtaggagatggtgctaactgcacggcgcttgtgtgtgaggccctattctaagtactgtgcagggaaatctaggaatttgatcctcacagtaacccagcgaggtggacattatcatcatccccattttaccagtttggaatctgaatcccaaagcgattgagtgacgtgtcggaggtatcccagcaagtctggatgtagctctgggaattcagatgctgactcaccacgccccataactttaatgctggagggtgtgatgggaacatattcctaggtgtccagagaggcagaataggaaccgtgagggtgagcaagtcagacaggtgggaggtgggctgagtcagggcggggaggctggtgtggccgcagcgacatctggtggccagcgctcttaacagccaccaggttcctggcctccaggtgctacttcaactcctggcttgcacctctggcagcggagcccttcccctgtggcctcccagaggctccagccaggcgagcactgtgtgcccacatctggctgccctgtagggggaccgtgtccattgaggctcctcccctgactgtgaggccaggcaagctgtaatggtataaaatggacatgtttggggacactggcctgggagccaggacacctgggggtcaggggacagggtggaagcttcccctctcagcttcagagtccccatctaggaaatggaaatgaccaggtggcactggatgaaacatacaaattacatacatgcaactgcaaagcaccaaagaagaaaatactcccaaaacccaatgcaattaacctgacatcaaggcaaccactgcgcctgacactgagctcaagacagagctcaagacgccaaaccactgcgcctgatgctgaaccactgcgcctgacgctgaactcgagatagagctcgtctagtgccgggggagttgctgggcttcctgggaggggcttgagatgtgtgtgcgcgcacacacacacacacacacacacacacacagttacttgggtgggacttacagtgattttgacctgggtcatttctactgtgtgtgtctccagacccaagtctctggggaaggggtggctcaactcagaggagggtgggcaatgctctagtgcccagctgggcacactcaccacaattgctgtccaggctgaccgtaaaccaaggctgactcctggtgccgtccctgctcctgggggaacggggggtcgtgggaagccctcatgttgctgagaagcaggagccgtgcttttttccaggtttcacttgaaaaagaagatgagggtctggcgggactccttcttggtggagagagggtgagtgccgggtcctgggagggacacccctgcccacctccctccctctgcccaggaagcttctgtagccccaccgcatcatgctattcaggagctgcccatggctctgaagttggtccaaaggcccctaaacacaaagcccattcactgctcctatagacacagaattggggtctgaggtcacgtgtacgcttttggcatgctttgtccagcctctacaatgtcttcaatttatttaatttattgccaactcatgcaatttgggaagtttcttataaaattccaatgtcttaagtttcctaaacatcagaagacccgggcaggtggccctgcgccctccactgtgaggaaaagccggagccgagggggcacccctctaggtgggcacacatgcctccggggctcctccagagctgagaggccggccccgcggctcctgctctctgccccatagcaagctgctacacaagagagacaatgacaaggtggacgcccaggaggagaactttctgcccaagtaccagcgtgtgaaggacctgtgtcagcgtgctgagtaccagacggcgtgtgagcagctgggacaggtaagaaggctcccttccctcccaacggctccccctcctgactgcagccggccctgacctgcgaggctctgagagccgctgagccagcagggccagggcctcccaacgggtagtcctttgctgccgtgtggtgcccaagatgctgtttggtggtgcaggatgatgctcacaataagtgattcatttctcagcagcctttggaccctgaccgtgtcagaggccaagtgtcccgtgggtgtgtgtatgcccttagcgcctctctagcccttgccgatctctcttgcacgaaggccccagcaggagttaaattattttattttcaccatattcactttgacagtatcctctttgtgactggttttccttttataggagtaataagacatggctttttaaaataaatataggtaaggttttaaaaagtgaattgattgcaagagaaatattaaggaaattatggccaggaacagtccgtggctcatgcctgaggtcccagctactccagagctgaggcgggaggatggcttgagcccacgtgttggaggctgcagtgagctatgattgcgccactgcactccagcttgggtgacagaataagaccctgtctctaaaaacataagaaaaaagaaaattatctgggaagtatcagagatagccagaaactgacatgtttgggaaagcctgaaggaggcttttctgaggctggaaagccagggcaggcttggagaggagggtcgggggcggggcagggcagggaggggagtgggatggaaactctgccttggctggcccaaggggtgccggaggtgtgtccctgccctgcctgtcaaaggctgggactttgagctggggctggagctgtgtgcctgtttcacctatgagaaaaagcaaaaccagggccctggtattgaaggccaaggcctgaagtggatgcgtttctgatggactgcatttgaatgactccatcttaacactgcacacagaattagtacaggcccatacaggcctgactgtgcctccccacccagtgtgtgtttgtaaacccacagacccctcttagtcacacaattaacccgtatctgccaccgggcaggagctgtggatttcatccctccgttgtacagcatgaatgcgtccccccgcttgccaggcactgtcctaggcgcagggccacagcctcgaacatgctcaacagaagctcctgccctcccagagctgatgttctggagagagttcagccttgactttgtaccgagatcccagaagtggttctgattttagttctgggctaaaaggagtgaaatgaggaggccaggaagtctttgcccctcgacgagggaacgttgtcaagtcccccactggttctttctgatgtctcccctgacccagatcagggcttgggcagccagaatgacctctttgctggggccaagaaagaggaggtatcagcattttccaaacaatcagagcacaccactgaagccaaaggaagagagtgctgagggcggagtttggggcacttagcctaggccagctgggaggcagcaacccacggcccccgacccagccccggagctttggggacctcaggctcagacgtctgccccccatcccaggcaacggccctgctcacaagccggtactccccgagtgccgttgccatgtccctgcttgtgccgtgccttctggaatgccctgcccagtgtagaagctgtaccctgtggcccgaggacgtctcttaggggcctcacacccagccatagcattgtcttgggtaccttgtccgtgctaccccacgtggtagatgtttttttgtcatttgctgaacaaacgtgcccaggaaccgagctcatgtgcatctgtctgtctcccggtgacacggggacatcctaagggcagggcccggctagaattcatgtcatcattgccaaagcccagaccagggcccaggccgggcaggagtaaatgtgccctgggcacctcgtaatgatgatcatcacgggcaacacgtgagtgtaagctctacctccagccaccctatctggcaggtatgttctgtacacggggaaactgaggcccagggctcaggcaaactgcccacagcctcacagcttcaagtggtggaggcaggatttgaacccaggtagttgggctgcgggaccttcgttctcagcagctgtagggaccccaagtcaagccgacactggcccagccctgtggggctcaggcgccgcccccgccaggacagcctcgggacgggccatgtggacacggcttctacatgagtagttgcaggggcagcaaaccctttccgcacaagatcagacagtaaatagtttgggctttgcaggccacatatttgtttttgttcttgctttttacaactctgaaaacgtacaatgtaaaaaccgtccttggtttgcaggccatacaaaaacaggctgtgggctggagttgactagcaagagggctgctgtttgccgacccctcaagtcgtgccccagctgagtttgttgggttggagcggggagcaggcagtggggaaggagaattccaggcagagagagctaagtggacaggaggctgctcgccagcgcacacagctcagggcttcacgcagaactcagagccctggcttttcttgaaaaatcagacctgggcttctgggcctgtgctcccctctggcgacagtcagatgggtatagccggtcacagtgcccactttagcctccccaggtcccccaggcgcttctgggctggcctcattcagggccatgcctgctggcccatcagtctacttctgcactaaggaatccaggttgctggaagggcctgcatgcattgaaggggatgggagggtggcagggcgctgtgaatgcaattagattcagcctccaggtgagaacagatgggcgggacaggggcaagatgagcaggtgaaaggcaccagggccttcaacggcagcgggcgggggcagacggtgcagcagagggttgggggggatggtggcaccagactccacacttttccttacagctcttgcacctcccagttgtgtgacccaggacacatctctctacctccgtgtgcctcatcttgaatcggcacagtaatgacagcacctgcctcgtagggtagcgtgaggtgtagtaagcaagttaatatattaacacacagtgcttggcacatgctaagtgctggagagacacagggaacagatctgacccatggcctggaaaggtcactttggcacagaataggccctaaagagtcactgggtcaatgggctggagcagctgtggacagaagggaagagaatccagtttacaggtggttgcagaatcccgtgaggggatccaggaggctggaactggggaagagcagaaggatcaacacgagagatttggacagtgattctatctacattcagcgtctgaccacaggcctggagttgagtgcacacgtggagcctctgcacacactgcactgattgagtctgggaaggtggtcaggggagacctccttgcgctggagcagacgggaaggaagagaagcctccagcagcaggaagggctggagaaaaggcattctaggcagaaggaacagtgagcgccaagtccctggggcagcagcccacaggggatactggagagagggctgagggagaggaggaccgatgggtaggccagggccagattgcagaggatgttcaaagactagtatcaggagcttgggtcttgtcttaaagacagtgggagccattgaagggttttaagtaggagagtaatatgatccaacttgccctttaaaaagattcctctagctgccatgtgggtggattttaggagcagacagaagcaggtaaccgtgagagtggtggctgtcggaggcatctcgctgggggatgatggtagctctgcccaaggttcaagcagtggcagtggagagaagcggcattggagatagcagaggtggggctcggtaacagctggatgcaagcagggagagggatgtctccagggtggatgggggtggcaggggagaggcgggtttaggggagcagatgagcagctggccgaggccctggcatgtctttcagaagtggcagtgtgtggaggacgccacggggaagctgaagctgcataagtgcaagggccccatgcggctgggcggcagcagagccctctccaacctcgtgcccaagtactacgggcagggcagcgaggcctgcacctgtgacagcggggactacaagctcagcctggccggacgccggaaaaaactcttcaagaagagtaagtgtcacaacctggctgagtgggacaggaggagagagaccatgcctggggggccccattcattcactccgacagttccacagagactgtcactttgccaggtggtgatctaggggctggggacacagccacatctcctcacgagccacccattctagtggggagcagtagtaataaacagataaggccaggcgcaatggctcacgcctgtaatcccagtactttgggagtccgaggcaggcagatcacctgaggtcaggagctccagaccagcctggccaacatggtaaaaccccgtctaaaaatacaacaattagccagatgtggtggctcacgcttgtaatcccagctacttgggaggctgaggcatgagaatcgcttgaacccaggaggcagaggctgcagtgacccgagattgtgccactgcactccagcctgggcaacagagcgagatccatctcaaaaaaaaggaagaaacacacatacaaggttctgtattgattggctggtgaaaatgctaggaccagaggttcacaggaacccagctctgtgcttcccctaggagccatgtttcagcgttcaattagtcagtgtttgtggtgagtttatagaactaccctgggctgggcgcggtggctcacacctgtaatcccagcactttgagaggccgaggtggacagatcacttgaggtcaggagttcaagaccagcctggccaacatggtgaaaccccatctctactaaaaatacaaaaaattagttgggcgtgtggtgtggcagcagagtcgcttgaacccgggagcagaggttgcagatagctgagatcacgccattgtgctccagcctgggcgacagagtgagactcggtctcaaaaaaaataaaaaataaactaccctgaagaacaaaaatagactatagttgagtggggaaaagcctcactcagctgaagaagtgtctacaccttcacacctcattctcggcaagggccgaggagaggacagtcagacagaagccagggagcaggcgaagtggagagagggactcttctagacccagccagaaggctcagccgccaccctgggccatcgcttcaccattctgaggctcagctcccaccatcaaacaggaagaatggtccctgcatgactttaaaacaagaatgagcctgtgccctgaaaatgtgtggaggcgtcggggtccgccggctagaagtgtgccctccaaggctgggcagcttcccacgtagcccatttctctggcctaaggacagccaaagcctaatgagagattttaggtgttgtttttaaaaaaaattatggtgaaattcccataaaatttatcatcttaaccatttttaagtatccagtagtgtcaactatattcccactagtacgcaacctatctgctaaatgaactcttcatcttgcaaaactacaactgtccccattcaacgttatctccccattctcccaccccgctcccacccccaccccgttctcccaccccgctctcccaccctgctgtcaccccattctcccacccgttctcagcaaccactcttcttctctatgagcttgactgctttaggggcctcatgtaagtggaattgtacagtatttgtccttctgtggctggcttatttctcttcgcataatgttctccgggttcatccacatggtagcctgtgttggaatctccttcctgatcgggcacagtggctcacgcctgtaatcccagcatttcgggaggccaaggcaggcggattgcctgagctcagaagttcgagaccagtctggccaacaaggtgaaacccgtgtctactaaaaatacaaaaattagccaggcatggtggtgggcgcctgtagtccctgctactcaggaggctgaggcactagaatggcttgaacctgggagcgggaggttgcagtgaactgagatcatgccacttcactccagcctgggtgacagagcaagactgtctcaaaaaaaacaaaaagtctccattctttataagacggatgatattgtaccacagactagttagagattgaggtctctgacggcaggcgcagtgatctcctctggtccagccagccaggcagcaaatgtcttcatcgtggagcagataagtctctctccataacagcccagccactgcctgaaacaccgtttcccagctgatgaccctccgttacatttcctcaccagctgattaggaactactacattaacttttctagctgaacagaatgattggtttccagattggattacacagccagcatctccttgcttcaatatgtggcacagtcgataatctttaaataatacaagatctggcagggagaaattcagctcttttccccttattaatgcttagaggaaagaaaaatacctaaaagtagctgagagtcagctcagccctggtcagaatcctcatgtgagtgtaatgtcagagccgggacctgcacctctcaacagccctgtgagcagggcaggggtgatcatcaggggatgatggacaggaaagactgggtcacgtggctgatttggggactccagccccatctcctgcctggcattcttccccctgctagagtctccgacaagacactctgtccctcttttctgagcagtcagcctagagcaggctgaactgggggctttctgtcccccaggggacacttggcaatgtttggagacagttttggctgtcacaattgtgtgtgatggaggggtgctgctggcgtctagtgagcagaggctatggatgcggcaaaacatcttgcaacgcacaggacggcccccaccacagagtttgatctgaccccaaagtgtccgcagtggtaaggttgggaagccctggcccaccttgatccacggggatcctggctgtggcgtggggaggttaggcagagccagccagctcacagcagaagggggacccaggaacaggagaaggggacgaggactcgggggatgggcccagctgactggggttcattcatttcttgaactttgtgcaagacactgagattagagttgacctggagagacacggacttggacctcatggatgaaacaagatgtgaacaagtgaacaaagggccacttccgctggtgaaaaacgcatgaaggagacgcagcggtggcgggactagcagagaggggtggcggctccagaatggcgctcaatggacatttaatgagaacaaagtacagaaaggagcaggtcttgtgaccagccagagagcaagtgttctgaggaggaggaagatggagtacaaagaccctgtgctcagaatcagggcggtgagtcccagtcacagagaggtgaccggtgtggccgagggtggtgagaagcaccatgggcatgggcagccacatcacacaggcggtcaccggcgtggagaggcagggagtgggcccagggttgtcaccttaggtgaggacgtcagctgcaggcagagtccccaccccctgcagtagctggtccacaccagctcatcaggcatgaatgcttcactagttccgtttcgtgccatcctccaaggagcctttgtagggtaggcaccatcctgagaagttacccaaatcgccggggccacacatgtgctcaggggtttgcacctgagccatctgattgcagagtcaaagctcttggccgccgggttatgaagtcctgtcccattccctgttggtgtggcaggaagggtacctccaggactctggacatgaacacagagtgatggggagagcaggtagtgtggcttcagtccaggaaaggattcacacagggctggcataccgcttctgtgaagagccagagagtaaaggtcttgggctttgcaactcagccctgcgactgcagaggtataagggaatgcgagcagctgtacccagtgaaactgtattcacaaagacagatggaggctggcctgggcccttaggccatggtttagggacccctgaatctagagctgggagatggagggtggaaagaggcaaagcagctcacttatgagccgactgagacaaaaggagtggagaggacacgctgggtctatttcctgagcctctcggggcaggacctgcttggcacagggaccatcctcggcaatttgtgtacttgcatcgggagactaaaccgagggagagaagtgcccaggagaaggctgccctgtgtcagaaaaggcccaaggctctgctggagaggggaggcctttcccggcccctcaggatccttcggcccttgtgactctgatgcaaggtgtctgagaactgaaagatacaaaacatcccccaagagtgggggtggcacccgggccacgtgagaagggagccctttcctccctccttccactgccttccgccaccacctgcctccagctggtcctctttggtcaccatctcggggtcacttgggatccaacaaaacctgggtcactaactggctccaggcccttctctttaaatgaggcacatctggagaaggatgacaactgcagtgcgtgcctgctggggccagacatgtgtcaggtgggcagaggttttaaaacaggaaggagtggcgggggctgtggccaacagggaagacagtgggcagccaaaggggccgcccatccccggcccgtcctgaccatatggaactgtgggcccgtgagacatctgtttcctttctggaagctggaaatctggatccctacatcaccgccaccacctcccctttttctttaatgttaccaactcagatttgtttttgagacatagaagatacaggctacctggggtgtcacttcagcctgcacccctgagttttcagcgtcagggcgtatgcaaaagcccccctcagccttgttgccggcccacctgggtgtagcacctgcctaccacctggtgggcagcctccagctctctgggactcaaagaagctaagtggcttccccagtccccgtccatttctacccagagacaggcactgcagggcccctttttcccagtttaaatcaacatttttacatccatgatactttttttcctttttaattgaggtgaagttcagataacatcaaactcaccatttttacaattatatacaatgcagaggcatttaataggttcacagtgttgcacacctctacctagttccaaaacatttcatcaccccaaaagggaaccccgtacccacaaagcagtcactcctcactaccctctcccccagcccctggcaatcaccaatcttctttctgccgctatagatttacctattctgggtagttcctataaatagaatgtaacaatacgagcccgctttgtgtctggctggtttcactccgcctgcttttgacattcatccacgctctagcgtgaatcagaacctcgctcctggttctggtcgcatattccgttgtacagatgatgtaccgccatttgtttacccgcaagcagctctcgcttgaaatcctcttgagtcagtggcttcttggctccaggacttccgtcttgccggtgtgatcacctcgaggccctcccctgcggtccaggatctgcgagcaggcgggtagattccacgacccctcgagtcgcaggcaaagctgagcctcatgcttggaagcccggccctatcttgatgaaggacccactgccctgggagcctggccagcctttcctgcctccctaactctgccactcctctaatgcccacagagtacaaggccagctatgtccgcagtcgctccatccgctcagtggccatcgaggtggacggcagggtgtaccacgtaggcctgggtgatgccgcccagccccgaaacctcaccaagcggcactggccaggggcccctgaggaccaagatgacaaggatggtggggacttcagtggcactggaggccttcccgactactcagccgccaaccccattaaagtgacacatcggtgagtgtccaggtggaagtcgagggtgaaggggacaggacagacctcggcaaagggcttcccacacctcttgggcccctgaggaccaagatgacaaggatggtggggacttcagtggcactggaggccttcccgactattcagccgccaaccccattaaagtgacacatcggtgagtgtccaggtggaagtcgagggtgaaggggacaggacagacctcggcaagggcttcccacacctcttgggcacctgggctgctccccctccaccacctccgagccacacgtgatcccttctctcaagcaggtgctacatcctagagaacgacacagtccagtgtgacctggacctgtacaagtccctgcaggcctggaaagaccacaagctgcacatcgaccacgaggtgagtggagagcgggagaggagcatgctctcggccaccacgggcctggcaggacccccggttcacagtgggagggcagtgaggccagacccagggaagaggctggagaggtgaagtgaggtccccacagattcctcaacgcggggataggtgtcagtcccagcatgagacagatagcttcctgcccaggccgtctgagggacgatggcttagccacgttgtcccccttttgacttacaagaagtctacgctacaggaggcctttcatcaaacccaggggagacactggaggcctcagtgggctcagcgggttcctgcgcaggccaggccggaaaaatgactcggttcccttgcaagggctggctggaggagaaggcgggcttccttcaggcagaacaagtacctcctccccacccagacatgccggtgcttgccctggggcccggggagtgcaggctgccgctgctgagcacagacacggcagcgtgggggcagtcaccaggccaagtctttgttgtccagccttgaaggtttcaaggcctcctcttctgcccctccctcagattgaaaccctgcagaacaaaattaagaacctgagggaagtccgaggtcacctgaagaaaaagcggccagaagaatgtgactgtcacaaaatcaggtgaggcagtagcaaagggacctccctaagaccccactctcctacaggacagttcagttcatcccctctcgtgattgacccctttcattttttatttttatctttatcttctcccctcatggcattaaaaaaatccgtaatttacctccctgttgtcagccagtgtggcacacggacctgctcctcagccaggctggcgcccagattccagtactgctagcaagagacccgtgctggctgcgcagagccggctccaggccggaaaagtgcctctgccgattgccctttcagaaatcccccatgtggtttgaggtccatgttcccggcttaggggtcccctggcccaaaggactgaactctagaacagctctaatagaacattctgtgctgacggaaatgggctatatctgcactacaccacacgtggctggtgcatacttaaaattttggctagtgtcactaaggagccaaattttttattttgcttaattcaaattgaagtagccacctgtggccagtggctaccatactggacagcacagctgtagaagccctgctgtctttccagaaagtgttgcaaaacacaggcttccctgtgttgaccccgaccaagtgtgagtaggcagggtggtgagggaaccaacctcaagatgctgaggctttgacatgtaaaattaaccatcaaaaaagaaaggaaaaaggatgctgaggctgatgcacctaaagccaggcccagcttctagtcgtggctaaattacaattaacccaacctgctaaagtctagcaaaagtccaggcagagtcctggctcatgcttggagaaagaagccactcaggcaggcacctgctgccctgaggatagggtcatgccctacccaccaccaccccagaaggagggacaggggtggggcagcagcaacacatgggagtcccagaaatcacagcttgcacctgccagcggagccctctgagccactcctgaagcctggggctgggggggtctgttacagctaccacacccagcacaaaggccgcctcaagcacagaggctccagtctgcatcctttcaggtaagagcagcttgaggtcctggggaagagatgcagaggcctgcatgaggaggtggccctcccttaagctaaaactcagaagaaaaggaaagaagtccaggcccttccctgggaagtccacggtagccctcgaagaggccttacttcccaatcaacactgagcgggcctccgacgcccccttgtggctaaatggggttaccgcaactccaccaagcagggcaggacacaggaaggaggggaaaggggtgtcaacaggagtcccagtagctgcctggttctgtccccagcttgtgcccccttgggagttaaagtagaatgacaagacccaggttctggtcccggctctgccttggagcagcactgggacttgggaccctgaattgctatgcccatggctctctgttggagaagcctcagcgaagcccttaggtggacaggaagagcagagacatggggtcactgatccctcagaggcccaaggtgtgtgtggccctctgcgcccataggaagggcctgcaagagaaggacaaggtgtggctgttgcgggagcagaagcgcaagaagaaactccgcaagctgctcaagcgcctgcagaacaacgacacgtgcagcatgccaggcctcacgtgcttcacccacgacaaccagcactggcagacggcgcctttctggacacgtgagcaagcccagggcaggggtggacaggctgaggcccaggggttcaagaaacttctccacttagtgacccagacctctctcagaaagggggtccccaacaccaggggtccacggtgctcgggacagcctcttggcatttgacgaactggttttaggggctgtccctgacaggaatcactgttggcagatggggcctcctcccgcaggcactcaggacatgctctctcttccttggcagtggggcctttctgtgcctgcaccagcgccaacaataacacgtactggtgcatgaggaccatcaatgagactcacaatttcctcttctgtgaatttgcaactggcttcctagagtactttgatctcaacacagacccctaccaggtacaggcaacccgagctagagggatgggggtgtggggtacaccagtgctgccaggtaggccccccccaacctcagggaagtgatgacaaattgtccaagtcccactgagtccctgagccggtgggagtaagttgtgaagctgctgagattgggggttctgtgttcaatcagccttttttgcctccatcaccctgctttttgcctccatcaccctgcgtgtgtaatatatatggcttcttccctctaacttaacatgcagcatgcaaccaggttttgccggaacttgtgaagactcctaacactgtcaggctgtaggatcaagccaaatatcacccactgcagggcctacacggaccgcgcagctaatataacagtaacacactgcaccaagcactctgctaagtgcttccgtacagtaagccatctaaacacacatgcgactgaagtggcccaggaccacacaagaccaaaaggagcagtggcatgtctggtcatcggaacatgtgggcccttgtacagggacagtcactactgagctccagcactagagctttcctgtactgtggccttggtattgcccaggctttgacctttcaagaaaagcctgaaataatttaaatgaaatctgatgtttaaatgtcagcagcacaaatgctttaattactatataggtgtgcagtctttctccttagataggttcaccctcatactttaccaaaggggtaggttaagtccctcaccggtagctcccagactacacaagaacccaggccacttacccgtcctttcatcaaatggctgctttgcaatcaggaggagctgagggcccctgaatgaaggctgctgataaaaccaagacttggaaggctttctttccaagcttgggaagtttcctgaccagtggctgcagaactccaacgttaaatacacagacgtggtttttattctcctgagttttcactctcatgaagagtgaacctggtgggacttgaagccaaaaagtcacctaactcttccaaacgctggctcttgcagaagttggagtaaacaggtcaccagcccctagcaccttccacccgccacctgcctgaaatatgtcccctggttggtagaagggcagggcgagagtccctgtacttaccttgttgacagactaccttttttgcaaccagctgatgaatgcagtgaacacactggacagggatgtcctcaaccagctacacgtacagctcatggagctgaggagctgcaagggttacaagcagtgtaacccccggactcgaaacatggacctgggtgagtaggcaccccaacgtggggcccttggacagcagggtaaccaaaggaagggactcaggaggtggtgtctaccccaagaatgagcctgaaatcaccaggctttgggaggtgatacagttccagacgagtcatgggagcccctgtccatagcaggcagatgacctttaacaagctgtgattcctgagagaggaacacctgcaccaactgcccaggaaacacacggaattccgtctcatttcattgtcctcccttttgtccactcatgcattcaacaaacacttcctgagaacttacacctgaaaccatgttgactaaagatgaccccatcctcgctgacttgtgtggagccagtgttgtcctaagaagagcagtccacagcaggaggcctcttgcttgtatggaaagggtaaaactggatggtagaatccagtgtgactggggaagggcactgctaaataaaaccagggtcagacctctgaactgagtcctgaaaagtaggatgcaatcgaccactgagaaaacgtggagggctggcgctccaggaagcttaaagtgtgaggagcagaaagcagctcagggggtgcagccaacacaactgaggccagtggagagtggcgggagggcatcgggccaccctgtgtggggcttcctaggccacggtagagtttagatttcatttgtggtgtatcaggaagccaatggagggttttaacctgggcaccgacatttgctaggtggagaatgggactttatgggagaaaacagcgaagatggcccagttatccagggagaaatggtggtggcttggactagaggtgggagcagtaaagatgatggatttcagattcaggtggtgaagcccccagacaacatggtgatgggaggtgcgggattaggagtcccaggtaaatcctgagttttgtttgggacaggacaaaatctgcagttttaagtttagaatgccaaccagatagatattttaagatgaaaaaagctaaacaggcatggttgctcatgcctatgattccagggctttggaaggctgaggtgggaggagacttgagcccaggagttcaaggttacagtgagctatgatagcaccactgcactccagcctgggagacagagctgtcgccccatctctaaaaataaaaaaaatatattaaaaaaagaaaacaaagctaaaagaaaaatgaagttcacttactagtgagagagagtggcctaaaaaaaacctttggtatttaaggtcccttggggaagggactgtgtctaggaggatgcctagagttcatgtcaggaaaatggctacacagcttaggaggaattcagacgctaccgtcggctctagttatgaagagggaagagctaatgtgtttacacaagatgttgcactaatacttctggtcaggagcctgatatgatcagaattttcactagtagcttcctaatctctgccactcaagtgctgctactcttgtgatcaaagtgcaatgacatattagtcactgtgtgccaggctctgtgctgagcattttacatgtgttagctgataagctttgaggtgaatcttatcctcattttatggaggagtaaggtgaacaaggtgggctgaccccggagcccacgcacttgatcctgccacatcctcgggaaaacttccccagagcccaaaggggaactccctcctgcacttggtcagggctcttggctttctgtcctctggagcacagatgttcatgcctgcatctacctccctcaccataactaaggtcagcgctgaatgaagccatcagggtcctgaaactgatcatggtgacactggattttaggcaatctacaaggctatctaggagacttagggcaggttcccctcataattcagtctacccctcataattcagtctactctgagtagggaacactatcagcatcatgggattgtgacaaaaaagcataagatggttttctggtgtgttggggttgttttgcctaaactatctgctcctgttttgtttttcatttctccttcatttaggacttaaagatggaggaagctatgagcaatacaggtatttcgttttattattaaagcctaaacaaagttctcctatcttggcccatccttcagtctcatctctgtgagtctgcacctgttatcttgagaaactgcccttccctctggtctgcccgagaccaggatcacccaccaaagataggtgtcacctaggagaccttctttgtatagttctttggggactttttctttcttggtgatggttaacattcattctcctttgacacttgaaaacttaggcagtttcagcgtcgaaagtggccagaaatgaagagaccttcttccaaatcactgtgagttgaggaaccagcttacaaatagaaatctggttctgaccgcttcattttgccaatgctattctatttgcatgccatttcttacataccaccctttgtttgttctcatgatgagggtgggggggaagtactaatgcacatctttccctaagaaaacacttgaatccatttcatgttttagattaatgccttgtccagtacactgctgttctcgctataatctgtgcttggtaaacttgagctattacttagaggttgagaagcatttaaatattacaaattgctaggcatcttgaaggctgtggctacaaaagtgctaactgatatacaacatcagtagtaggatggcctcattaaatggtttccaaaaagcccatgctacaaactctcactccagtgccattggaggctgacagggactaagagactggcaacctgtaaagttcacctctattctaaagggagcaggccagtttgctccctgcaggaatgggctgaggttcgccagattttctcattcgtctaccaaatccaaaaatgcaagtatgtgtgagaattctttatcattatcatctaatttgacattaagttaaccatgtgggcaaattatcgcccttggtgaactgccacttgcaacctctggtctactcatttcttcctttatatgcatataaacctgtgtggctttaataggacattagtaacaggtcacctaagcctttcttcggtgcttctagaattaaggtacagaatctttacatatcacaatctccttagccactattctgtccagatccttaaatgccatccttgccaggcattgggtgtataagtaaacaaaaaattgaggtgactaggtggtggcaatcccgttctaagtaacctagaaatattcattctcagcagccttgaagcaaagcttcctcagctataggaccgattaggaagtcatgataaagaccatgatagctaagtgctaagatgagtttgttttgttctttaggggacaactgtgggaaggctgggaaggttaagaaacaacagaggtggacctccaaaaacatagaggcatcacctgactgcacaggcaatgaaaaaccatgtgggtgatttccagcagacctgtggtattggccaggaggcctgagaaagcaagcacgcactctcagtcaacatgacagattctggaggataaccagcaggagcagagataacttcaggaagtccatttttgcccctgcttttgctttggattatacctcaccagctgcacaaaatgcattttttcgtatcaaaaagtcaccactaaccctcccccagaagctcacaaaggaaaacggagagagcgagcgagagagatttccttggaaatttctcccaagggcgaaagtcattggaatttttaaatcataggggaaaagcagtcctgttctaaatcctcttattcttttggtttgtcacaaagaaggaactaagaagcaggacagaggcaacgtggagaggctgaaaacagtgcagagacgtttgacaatgagtcagtagcacaaaagagatgacatttacctagcactataaaccctggttgcctctgaagaaactgccttcattgtatatatgtgactatttacatgtaatcaacatgggaacttttaggggaacctaataagaaatcccaattttcaggagtggtggtgtcaataaacgctctgtggccagtgtaaaagaaaatccctcgcagttgtggacatttctgttcctgtccagataccatttctcctagtatttctttgttatgtcccagaactgatgttttttttttaaggtactgaaaagaaatgaagttgatgtatgtcccaagttttgatgaaactgtatttgtaaaaaaaattttgtagtttaagtattgtcatacagtgttcaaaaccccagccaatgaccagcagttggtatgaagaacctttgacattttgtaaaaggccatttcttgggagttttttggtgtgtctgtttttttaaagtattcaagatactaccagtcaacatctttttggaagaaaatgccttgggtttagaagattttcttaaaaggggagtagatggttgtagattgactaaaaagtctaccatacttcaagggactacaggtaagtctcatagtataccagctttggtacttcattttttaaaaaagtattaatcaattgcaaagaaattcgccttggccaacccttctttgtgtatcaggtagtctaacctgatacaagtagttgacagatttcaactatcaatcaccagtccaacccatttctcatttaacagatgacggagataatccctaaaagcacccacatttgtttcaatgccccaaacaggccaaggctccctagcaactccctagtggcgttttttaacttctcagaaactgttaccattatttgaaataggcttccttaacctcctttacccttaacccaacagggatttaaaaaaaaaaaaaaaaaaaaaaaactctttaggctccaattttaaatagaaacctttatttacaatgacatccaaaatggtcagcaaagcagtcacagctcaccatcccccataagtcatttcatgtggtttcaattctttgcaagataaagaataatttctatttttttaagcaacataatgtaaacttgattgaaactgaattcattctcaagagtataagtcaattcctgagaatttaaatattgctctcatattttattcttcgaaactccatatattagaaaggaagagagaaaacaccctgctcgtttattaacagtgtgccttggagttgaaaacaataaatcaatccttgaggttttgctcctaggaacctaattgtgaacaaaactcacagcttctgcaaataaaaagggaactgggcaggcatacatgtaactggcaatccattctgtttactttcagctgcacccacctctggatcaaagaacttctaggacatcaagccaattatcttctgtaataccctacccctaatatagatacccccaactcacctca

SEQ ID NO: 12 - DNA, 4313 bp, Homo sapiens
taacgctctttaagcaaacagagcctgccctataaaatccggggctcgggcggcctctcatccctgactcggggtcgcctttggagcagagaggaggcaatggccaccatggagaacaaggtgatctgcgccctggtcctggtgtccatgctggccctcggcaccctggccgaggcccagacaggtaaggcgtgcttcttcctgctctgtggggccacagccagctctggcagcctccgccaggagccactgttttacatacatatttttgagcacctgttttgtgccaggtgctgttctaggcccttaaaagtatatccaatttacaggatcggcaaaagcaggtggagagtaactcagggtggcagggcccccggagaccttcgagaagtgcgacgaggagggggctgccttcagtcggggctgttttcctgtgttaggaagactatacaatcctcccaagtgtcatgtttcaaagaggaagtgttggcgtggggtctcagaatagtgcttttgactgttcatgccaacatctcccccaggggcagaccctcccaaggcccatccagataggcccaaatgccggtcccagtgatggccacctgggagaccctctcccacaggcccgaatgcccgtcccagtggtggccaactgggagaccctctcctacaggttcctgggctcccctgggatccatgctctgggagtcaaagccacctctctcatgagtgcgtggctggcaacccatattccctggtgttgtcaagtggatcggttgccctgggtccttctagggagtggaggaggaggccattcttgcttccttgggaagtgtttgcatctcaactcctttacctgcagaatggatcaacggtctgccctagggctgtcaggaaatgctgtgtggcagcatctgcgacttgcactttgccagctgtggggagctgaataacttatttgccgttattaggtacagtttcaaggtgggggcaggagaaagggctttctacgtttccaaagcaagggtttccagagaggcctgaagagggagcgcccagtggtgctgtccgtgcccccactgccctccagccacctcttgatctctgctgtggggtaccgggcctgaggggtgggcttgggcagcgtagaagagcagccagcattgggctgcagtgggaagacccccaagcccatggcagggagcgggggagctttggaacccgagagaggaagtggcctcggtgtacagaacgaactgggtgggtccccgtgctggccacccccaggcccatctgcctgcgcccttgcccccaccccagcccccagctctgccccctgtgctgtgggatcacagaggccgtggcaaactcccctccccaccccacacaccctctggctcaaggctcagagcgtctttgcgggtcactcaggtccatgatcctgttacaactgaaatctagaaaattgtgattacagtttagtgcattcgtgtgtggaaaccatttccatttatttccatcatgcgacaaagacaaagcgggtgggcaagacagagtctgccggaggcagagcaccggggctggaaatcttcctccctgaggaggaaacccccccgacccccaggatgatgatcctccctcaccacggggcctctcttgacccccacagtgtcccgggggtgggcgatgatcaccttcacgtcgcgatggatccagaccccaggagggcaaggttcccatggaagctgctgggcagcgggagctgaacacggatccttcccagcaagccaggaacactttctccaaagacatctcgaggcagtccctgatagcaaagcagacaagagaacagcccctctcggcctcccctggggcgccctcacctgagccagtgtggccagactgagttcctcccctcctatgccccaaggcagggacagggaccggagggtgctctgggctcctctttcaccccctgctgcaggctgtcaaccaccagatcctaataggttgctttctgagacctttgattccgcggagctcagagcctgaagctctggtgttagaacctcttgcataagatcctgcggcagcccccagccagccccatctgtccacgtgtcttcctcctctagatccctttcctcactgccctgcttcaagctgtttcacagcttgtaccctctgtcggctcctcctagaccaccccacccggtcctctcaccttacctgcaatgggtttccacctcctgaacacacctgggtctctggaatggcctttgcccatgcggctccatcttcacctggtgaacctcctcctgcagggagcccccctgctttgttcaacctgcttgtcattggcctctccggggagtgccctacccccgtggttaccctgggcaccctgggacgatggccttgcgttgtctcgcacatgttcttgcctttctcctccatcagatccttagactcttttttttttttttttgagatggagtcttgctctgtcactcaggctggagtgcaatggtgcgatcttggctcactacaacctctgcctcctgggttcaagtgattctcctgcctcagcctcccaagtagctgggattacagacgtgtgccacaatgcccgcctaattttttgtatttttagtagagatggggcttcaccattttggtcaggctggtcttgaactcctgacctcaagtgattcacctccttcagcctcccaaagtgctgggattacaggcatgagcctgggcccagatatttagactcttattaatgacttctctggttttaatttctgggtctctctcacctggcacagtgcctggcttttgccatgctagctcccacttctcatgcacacaaatggtgctcagtaaatatttatgtattgagtaaaatttaataatcatttgttgaaattaaaaagtgaataaataagttacctagaaagatgcaaagtccacaaacctggggcaccttgcattttccctgagcgtaatgtttgcacatcaggatgtgaggaccacgtctccctctcatgtcctgagggttttatatccgcctcactggacagttgctgatgtcattggagaaggaagctggatgggtgtgtgcatgataacatcaaggaattcagcccacaacttactttgcttcttacctgtgcactttcagagacgtgtacagtggccccccgtgaaagacagaattgtggttttcctggtgtcacgccctcccagtgtgcaaataagggctgctgtttcgacgacaccgttcgtggggtcccctggtgcttctatcctaataccatcgacgtccctccagaaggtatggcctttttatacgatgggttctgaagatttagaattagttagaaaagtcatttaagactacagaggctctgatcagcatcaccagctatgcctttacacagagtcacggccgccagtggtggtgcaatggggtagcctgagtcaggctgcattcaggtccaggaatagaaaggcagggctaagggacttgggaagaaacctgatttccccccggcttctcttcacatctctaaccaaaagcctgggaagagccactgttggtaacgctttctagcttgcctaggatagagggggaaggcatgacgaaatctgaagacatttcatgtattctttttttttttttttttttgaaatggagtctcgctccgttgcccctgagctggagtgcaatggtgcgatcttggctcactgcaatctctgcctcctgagttcaacctcagcttcctagtagctgagattacaggtgtgtgccactacgcccagctaaattttttttgtatttttagtatagacggggtttcaccatgttggccagaccggtcttgaactcttgacctcaggtgatctgcccgcctcagcctcccagagagctgggattacaggcgtgagccaccgtgcccggctgacagttcatgttttctaaagaatgtgcctatggatactttaaagtaaaaactctgtaattgtttaaatgtgaaagaaaatgtttatcctcactaaagcatctctttctccctccccctcacccctgtagaggagtgtgaattttagacacttctgcagggatctgcctgcatcctgacgcggtgccgtccccagcacggtgattagtcccagagctcggctgccacctccaccggacacctcagacacgcttctgcagctgtgcctcggctcacaacacagattgactgctctgactttgactactcaaaattggcctaaaaattaaaagagatcgatattaa

SEQ ID NO: 13 - DNA, 31346 bp, Homo sapiens
gacttaacgcgcccccgccccgcgcccggcctcggcagccgcctgtcgccgcgggagcagccgctatctctgtgtgtccgcgtgtgcgcccggtccccgcctgccgcaccatggagagctaccacaagcctgaccagcagaagctgcaggccttgaaggacacggccaaccgcctacgtatcagctccatccaggccaccactgcggcgggctctgggtgagtgcgcggcgccggccggggacgcggctcgggcggggcggggggcgtctgcggcggccagagtcgccgcgggctctgggtcgcgctgcgagatgcctagacgaggaaggtggcccgggcgccgtcggagggcggagacgcgcgcctcgcagggccccgggctgcaggcggcttccgctgcgccgcacactcgccctacgcccgggctcggccgcgtgggcctctggtcctccgtgcgcctcaggccggctcttccccacgcggatcgccggccgcgcagctgcatggtggcgcgggggatgggctcgcgactcgccaagtaccctctagggtgatgccgggaaggccaccattactgctgttctacagaacgcggccctcttaaccctctccaccacctggctgtgtgggcgccgccgggagtgttcccccttccagatggggaaacggaggctccgagttagtcagctacccaaagttacacacagggagatctgatttgagccccagcagtccgactctagagaccctgtttttaattcctcttgcaggagactcgggggcccggccttctccccacctcagactacgctcccctacccctgtctcctgccacccctgggttgggtccgagtttggagcagggggctgctgagacgccaggcagcggcggggctgattgggggaagaggggaggagggcggtggcacgtgggtgcagaaccctgggatccattgtgaaaaggaggtctaagatttgacctggggcgggaggaggcggagggcaaggagactgagaaggctgagcgccggaaggacggagttccagggccctagcgccgggagtgacgtcctggggcagggccagccaccaggtgctgtatctcccaggcaggagctggcgtgcctaggccccaagatccttccctggccagcccttttggcccagaaggtggacacccaaggagcctcctctgtagcggagacagggataattaatgagggccaccgtgcatgcagctggaggtgtccagtggggtgggtgagggggtcagtcagtgaattacttcagagcctgcttcccgctctgtaaagcggggacagtaatggcacttaaccacgctgggtggtttcaaggactccagtgctctacttggaggctgctttgaggccacagtgccagcagtgctccgggctcatgacagggttgtgagggctgcgtgatggatgatttctcgggaccttcccaaacaagctctgtttcagacagacaagattctggcttctggccaatttcattcaggatatattattaagaagtaaatctgttcacctttctgggtggatacgcattcaccctttgtgcctctaagacaccctgttctcagaagggattagatgtctttcaaagcccttcccccacccactgccttgcacactttggacctgttagctctcctgggtttgtgtcagtcttaccacttatgtggggtatcccctgcctgggcagggacctggcttactctcagctcccctttcaccagcctggcacacggtagctctgcaggccttgtattgcttatttggtactgttggacctgctacctttggccgtttcagggggtctgaggtctagctggagagaggcagcaattacccaactaagtagtattgcacatctgagcatctttcagggctagataaaacatgcagatgtttacagggttcctgagctgccaagtaggtatctggtatgacacagcatcatcgtttgttgcatcctgagaataaccctgtgagatagattgtgttgtattcacattttatagacgggaacactgaggctagtgtgttaagttacttgcccaggctgggaattggtggccattccgtactgtctggttggggctcatgctgtcaggaatgcttcttggcagggcatggtggttcatgcctgtaatcacagcactttgggaggccaaggtgggaggattgcttgagcccaggagttccagaccaacctgggcaacacagtgagaccccatagcttaaaaaaaaaattttttttttgagatggagtcttgctctatcgcccaggctagagtgcagcagcacaatcttggctcactgcaacctctgcctcccaggttcaactgattctcctgccctagcctcctgagtagctgggactacaggcatccgccaccgcaccggctaatttttgtatttttagtagagatggggtttcaccatcttggccaggctggtctcttgacctcaggtgatccacccacctcggcctcccgaagtgctgggattacgagtgtgaaccactgcccccggccaaacattttttttaattggctaggtgtggtgatgtgtacctgtagtcccagctacatgggaggctgaggcagaggatcacttgagcccaggaagttgaggctgtagtgagccttgaacatgccacacactgcagcatgggtgacagagtgagactgtgtctcaaaagaaagaaagagagagagagagaaagaaagaaaggccaagaaaagaaaaatagttgggcatggtgttacatgtatgccagcactttgggaggccaaggcagaaggttcgcttgaggccaggagttcaagaccagcctgggtaacattagcaagaccctgtctccaaaaataaataatgtttcggccaggcgcagtgactcatccctttaatcccagcactttgggaggtgtaggcgagtggatcacctgaaggtcaggagatcgagaccagcttggccaacatggtgaaaccctgtccctactaaaaatacaaaaaattagctggacgtggtggcgggcgcctgtaatcccagctactcaggaggctgaggcaggagaatcacttgaacccgggaggcagaagttgcggtgagctgagattgcaccattgcactctggcctgggcaacaaaattgaaacttcttctcaaaaaaaaaaaagaatgcctcttgggcaagcagtctgtgccaggctggagaatggtgaaaaaggtgaaagggaaggccaggtacagccgcggtggatattagtcagtctgaaaggcacttggagagaaataagatttacaaatgtagggtgctccaaaagagtggaatgtcaagtgtgtctcctagttctttgttaggcaaagtctgatttcctcaccgccgttacccctccggaaacatactgtggtgtccgagagttacaccatgtttacattgtaatgtcttggagagggaagctcactgaactcaaaaaatatccatttgcaaaagaaaaaaaggatatgtaaaatacagtgactgtgtgtgtgtatgtatatgtttaaaatatgcaaaaaaggagggaaaacttatttttcagaaggaaataacgttgctatgcaacccatattttgaaagttgtgagccaagagtatgtgtgtgtttgcacccaaaagctaatcaaggaagacttgagacacaggtagtcttctgtttcttgtccccagatgtttatcttgaggcccactgttccctctctgcaatgaggcatagagtgaaggctcagtccggaagccctggcccaatctgggctgtagtcacagctaaagtgacagtttgtcagaatgtccccttttctgggggagctcacaggactttgatccagttctttttcttttgagatggagtttcactcttgttgcccaggctggagtgcaatggtgcgatcttggctcaccacaaactccgcctcccaggttcaagcaattctcctgcctcagcctcccaagtagctgggattacaggcatgcaccaccacgcccggctaattttgtatttttaccccgtagagacggggtttctccatgttgaggttggtcttgaactcctgacctcaggtgatccgcccgcctcggcctcccaaagtgctgggattataggcgtgagccaccgctcctggccccttttccttttttctttttttttaagacagggtcttgctgtgtcacccaccaggtctggagtacagaggcacagtcatggctccctgcagtcttgaactcctaggctatagcaatcctgcctcaccctcctgggtagctgggaccacagacatgtgctaccatgtctagctttggtccaatcttttgctggccacttactgagacaggatttgtacattctgtgaggacccaggctcgtttctcgatagctttcccattcctatgccattgctgacccgtgtgcagtgaacctcaccaggcccaggaagcagggacactggcctctgtcaggagttgggcctggaggtgaagggacagacctcacagaaggctctttgttgaggcagcgcccacagtggctagagcttctctggggtcatctccttccatgggctgaaggaattatggcaagggtccagctcatcctggctttaaaaaaacaaaaccccagtggccttgtcagaagtggcctggatgctgaggctggtggcaaagatttctcagttctcaccagggccagactgtggtgttatccaaacagtgcaagtgtcatctgaggactccatcacagtcaggcctgattcaaaagggaaggtggtctgtgctttcaacaagtccccccagggtttctgacccacagctttggggaggttaatgcctggccagtcctggctggtggacacaggagatgagtccaaccctggctctgttcctagtggctgtgcctttgtcagaaaggcccttccggccaggtgcggtggctcatgcctgtattcacagcactttgggaggccagggtgggaggattgcttgagcctgggagttcaggaccaaactgggcaacatagtgagacctcatctctacaaaaaaaagaaagagctgtgcatgtgcctgtagtcccagctacttgggaggctgaggtgtgaggatcacttgagcccaggagttcaaggctgcagtgagttatgatcatggctctgcactccagcctgggcaacagtgaaaccctggctcttaaaaaaacaaaacaaaacaaaaaaaccttcctatctcaggttctcagttgcccaggctagaatgctgtggcgtgatctctgctcactgcagcctccgcctcctgggctcaaatgatgccctcatctcagcctcacaagtagctgggaccacaggcatgagccactatgccttggctaatttttgtattttttgtagagttgaggttttgtcattttgcccaggctggtctcaaactcctgggcttaagcgatccacctgcctcagcttccctagagtactgggattacaggccattttctccatcttgaaaggagaggttcatggataggtggtttcaaactgggtgcctcaggagtagggctggggatggagtgagtgggctccggggtcccaccgcccgctgttgctgattttacatcctggtgctctttgtgcccttaaagtggctggggttgtatcccagtttacccagctctgacatccaggtgctttggctgaaggcttgagggcctcctggggtctctggccccatgtggctccgcctctctgggcctgtttctgtttttgggctgcctcaggacccatcctggccctgactgaggcaagagcatgaccgttgagattgccccagcagcagcatttcctcactcagtgtgaagacactggccaccctggggtggcttggttctctgcccgagtgacctctcctctgcagggctggtggtcggtgttttaagaaactggaagtgaagtacagcacctagttaggatctggctgagactttgtcgtggcttcctatggactctaactgatgtccggcccctgttgtggctctgacccctcaacattcattgtctcttgtggcaggcttgttgtcactgtcgcctagttccacaaaatcaggaactcccttcttgccacagaccagtttgccctgggtgctggggacacttctagaggtcagggacctgcacagagctaggtcctcaggcaggctctgctcctgccctgaatggagaggcaaggtaggggagagaggatgtgctgggagctggggtgagcccacctgcagatgggggttgctcagaagtcagttgcatttgtgcactgggtggaatctccgaggactacacagctggaagggaagtgtggacgcccaagaacttcctctactgagctctcctagcacctttttcttcatttatttgtttgtttgacagagtctcgctctgtcacccaggctggagtgcagtggggcggcgatcttggctcactgtaacctccacatcctaggttcaagcgattttctgcctcagtctcccaagtagctgggattacaggtgcatgccaccactgcccagctaatttttgcattttcagtagggatggggtttcaccatgttggccaggctggtcttgaattcctgacctcaggtgatcctcccgccagccttggcctcccaaagtgttgggattacaggcgtgagccactgctccaggccctttttcttttaaaaacaaatttttaggccaggtgtgatagctcacacctgtaatcccagcactttgggaggccaaggtgggtggatcatttgaggtcaggagttcgagacagcccagccaacatggtgaaaccctgtctctactaaaaaatacaaaaaaaatgagtcgggcatggtagcaggcacctgtaaccccagctactcgggaggctgaggcatgagaatcgcttgaacccgggaggcggaggttgcagtgagccaagattgtaccactgcactccagcctgggtgacagagtgagaacttgtctcaaataaataaataaataaaaataaaaacaaatttctagcagcttgattaaggtataattggcgtatcataacattgtaagtgattttaatgaatttgcagagatttactacaaaaatttaccacatctcctaaaagatctcttctggacatttgctgtcactccccatttccacccccagtcctgggcaaccactaatctaattttctgtctctaaatttaactcttctagacatttcatataaatgcaattatacagaatgagttcttttgggtctggcctcttagcataatttttagagggtcatccatgttgtaacatgaatcagtactttgttccttttttttggggggtggggggcagggtctccactgtgtcccgaagctggagtgcaatggcacagtcatggcacactgcagcctcaacctcccgggatcaagcagtcttcccagctcagcctcctaagtagctgggaggcactcaccaccatacacagctaattttaaaaattatttgtagagacagggtatgttgctgagcctggtctcaaattctgggctcaagtcctcttcctgccttggcctctcaaagtgctggaattaacaggcatgagccaccacgcccagcccttcatttctttttacggctgaatattccgttgtgtggacatagtgcattttgtttatccattcaccagtttttcttagcattttgctcttatcctagctctgctgctggcaggccgtgtgactttaggcaagtcactttctgtgaaccttagtggccccatcctccgaatgaagcatagtctaatatttactgagcaattgctaatttctatgcatggtgccacgttctgtacatacacactacatcatttagtcagattcttcttttacctccgttttatagtgaggaaactgaggctcaaagaggttacagccccaaggttactaggatacatcatgtattcatttgtgcactcagtttgtgcctggtactattcaagcctgtggatacaacagtgaaaggcccaaagctctgtcctcaaggagcttgtattgcagtagggtagacaggcaataaccacctaatgtcaggtggcaagcatgagtgaggggaagaagagctattttagacagtgtggtcagggagggcttcttggaagaggtgacatggggcagagatctgaagaaacaacctgaggtctggagccagaggttctttccgggcagaagccagctcgggtagttcagggcacaggaagagcaagaactgcttctgatgttcatttccaccctgacatcctgggattctctcctgagtattttttttttttttttttttttttgaggtggagtctgttgcctaggctggagtgcagtggtgcgatctcggctcactgcagcctctgcctcccaggttcaagcaattctcctgccttagcctcccatgtaaagtagctgggactagtggcccgcaccaccatgcccagctaatttttgtgtttttagtagaggcggggttttgccatgttggccaggccggtcttgaactcctgacctcaggtgcctcaggtgagccaccgcccctggcctcttctaaatttttttttttttttttttttgaggctgagtttcactcttgtctcccaggctggagtgcaatggtgagatctcagctcactgcaacctctgcctcccaggttcaagcgattctcctgcctcagtctcccaagtagctgggattacaggcacccaccaccatgcccaactaattattgtatttttagtagagacggggtttcaccttgttggccaagctggtctcagactcctgacctcaggtgatccacctgtctctgtctcccaaagtgctgggattataggcgtgagccacctgaatatttaaaaaaaaaaaagtatatgcataaagaagaagataaatgatgtactcttgtcataaataatgaacctgtgtgtagctgctcccaggattaagaactagtacattacagtgatttttggaactacagtgggtccctccatcctcatcttcccttcccctgagaaagaactataccctgaattttttgtttgttatcattctattgttttccttttttttttttttgagacggagttttgctcttgttgtccaggctggagtgcaatggcgccatctcggctcacttcaacctccgcctcccgggttcaaacgattctcctgtctcagcctcccgagtagctgggattacaggcatgtgccacatgcccggctaattttgtatttttagtagagatggggtttatccgtgttggtcaagctggtctcaaactcatgacctcaggtgatctgccctcctcggcctcccaaagtgctgggattacaggcttgagccaccgcacctggcctgttttccttgtagtatatacaaaaagacttgtacataaatcaatatggtcttctttgttaaacagatccttctgcactgtgcttttttcacactatatttgggagagaatattgataccggatttgtgaagtgtagctcgctcattcttactgctgtatagtatcccattatattaatatattccagttaacctcgtctattgataaacatataagtgagttccaggtcttgcaattgcaaacaatgcggggcagccctgtttgtgtttccttttttttgttgttgttgttgtttttttcctgagatggagtctcactctgtcaccgagtctagagtacaatggcacgatcttgattcactgcaacctcagcctcctgggttcaagtggttctcctgcctcagcttcccaagtagctgggattacgggtgcctgccaccatgcccagctaatttttgtatttgtagtagatacagggtttcaccatgttggccaggttggtctcgaactcctgacctcagttgatccacccacctcagcctcccagagtgctgggattacaggtgtgagccactgtgcccggcctgtttgtgtttcctgtagaatgtgtggaacatgtgagtacatttcactgtatgttcctactggtgaagttgctgggagttaagggatgtgcatcttcggctactgatctggtttatttttaatgcttgaaagattacttaggttctctatttcttcttgagtcagttttggtaaattattttcattattgttattattttttagacagagtctcactctgttgcccaggctggagtgcagtagcatgatctcggctcattgcaacccacgcctccggggttcaagctattctcctgcctcagcctcccaagtagctgggattataggcatgtgccaccacgcccggctaatttttgtatttttagtagagacggggtttcaccatgttggccaggctggtctttgagccgctgacctcaggtgatctgcctgccttggcctcccaaagtgctggaattacgggtgtgagctaccgcgcccaacctgacatccattatctcttgaaggagcccatctggagggtgagggagcctctctggccttttcttgcatagaaacctgtgagcaggtggagtgagcactaaagcgatgacagagattctcctggccaggggacatctggaagaatatatattgtcctggaggggagtggagagggggcttttttttttttttttttgagatggagtgttactcttgttgccaaggctggagtgcaatggtgcaatcttggctcactgcaacctctggctcccaggttcaagtgattctcctgcctcagcttcccgagtagctgggattacaggcgtccaccaccacacctggctaattttttggtatttttagtagagatggggttttaccatattggccaggctggtcttaaactcctgacctcaggtgatccgcctgccttgacctcccaaagtgctgggattacaggtgtgagccactgcccccagcctggagggggctttaagagactttctttgggcctagctctaagcttgccacaccaccgtcacaggttgaactaattggggttgtaagtggactgttttggtcaaggcagggtgtgttagttttttttttttttttttgaacagtcaagtgtgcttgttagccctgtttatcacagagtcagggtatacagtaagtaccctgtagcccctccaccgtgctcctcaccccatctctcgccagtgttcacccagagttgtcacacacagcaccacgggatggggcgtccacctgcagttgtgcaggcagtctggaatggcaggaaaaactctggccctgaggaggccacaggcttaaatgtatgcctttggccccaaaggcccgctaggaagttgagcttgaaagtaactgtctcctgtgtgctcagtgctttacagtgtgcagagcccggtctcaatccttggtgtatttctcccctcttgcctgcctgtggccagcaggagtgggtggtgtcaccatccctgcctgtagataagagctgcaggtgctgagagggttggcagtggtggcggctgctagagacctgggtactgtgcatgctgcgttatctcactgtgtctcccagacactctcccaagtgaagaagctgagccccgggttgacgaagcacttgttgaagtcacgaagcccaagtggcacagctcacctccccaacccaggatgctctgccgagggagagccccaaaagctctggggaagagtgcggggacacctggctcctaagcgttcttcttttgtgcgtgtttacttggtagaagtgaagagagtggccgcagcaggctggatgcagcctttggaaggaatgaaaggctgcaggcctagcaaggaaggcttaaaatcagctgcacgttctacttctcacccttggtcacctcgcagctgaccttcctctctccacgtttactctatctgggcctgggtgtgcttctgccacacacagaaagagcctgtgccacaccatttctccctggaaccccttctggtggccaatgggactgtcaccccggggtgtcgaggtggatggggcaggtggagccctgcacttaccgtccttgttcttccccggaacagtttggcccagtgtccacccacatccttctcccaccaaggatccctcctaatgggaccatggctttagaaacaggacccctcagggccggggctgcccttggaggtgggaaggacgagaggtcagcctgaggtgacctccagttgaagctggccctgggagcgtgggattagggtggcctccagttgaagctggcactgggagcgtgggattagggtccctgccaggcagaaaagggtttctcgtttaccatgtcctcccctccctctttcaggtgtagtgtcttttcccatgaccgggagttcatagaaatagttaagtataagatgatcgtgtgcgagaatgttggtactaaaccagcatggacagttttctggatttctctactactaacttgtctgcactgagcgtgactcacccctaacctggtgggagcgctgattggaggggcgggaggctggcggcgtgagctccagatggtgcatgtgcccttgggcttggcatgcggcgtgtcttcgtgtgaaggacctctgggagcagcgagagggctgagctgagctgagctgagctgcatgtggaggggccctcccgggaggcctgtgccctgaggctgaacttttaacaaaaccctgggaccagagggcttcagggctgatcaggacctgcagcgcttcctgctgggaagcaggaagcaatagaaagtttacgctttctattgctcaggagccgctcagtgattaaaacaagtctaaaaagccaaggggactccgtggccccaccactcccaggctggaaggcaggttcttgctttgtcagcccttcctcagcccttgtccataggcagaaggggtttttattaatacatgattgtagccttgtaggagatgagattatgtgtcttgctttgaaaattctacacaaaagcctgtttcctagttgctacagcagccctcaaactgcccatttctaaagctttcaagtagcccagtgatgcaattggaaagcccaaggcccagtttttcaggctaccacaccccatgcgtggaggctgctgggaggtctgtggtaactccatgagcctcagtcccttcctccctgccccatgggctcagaggcccagcacccctgggtgctgagagggcagggtgcccttcacaagtgggcagtgtccgggcagtcctgtcaggatgtggggtcagtcgtaggaatgccggcaccccttggctgctgagtccttagactcctgggggccactaggtgggaactgggttctacctgacagcagctgcccccagccgcagtgctagccttgggctgagtcttctgtgctagatctctcctgggcccctccttccttcttactcaagtccaaccccagatattttcagttgccgtgattctgaggatctgatgcccctggaaaggtacaacagtccccagcacccactagctggcccaggccccaaactgccaggagtggccttcttgagaccatgtgtcaccctcccagggaacaagagctcgtggctgtctgataagccaggcctgtgtgactcctcaggacatgcacccccaggtccctgtacagctgagcacaatagctcaggagtgcagggccatgatgcctgtgtctgtcttctctcctgggccacagccaccccacgtcatgctgcagcgccgcagagatcatggctgtcctctttttccacaccatgcgctacaagtcccaggacccccggaatccgcacaatgaccgctttgtgctctccaaggtaagagcccagctgcccactgccagccacaccttgcctgggactagggtcacacgggccctggaatggtgagtggtctttgaggagacctggctgggcccacctctcccaggtgccttctccctgctcgtcctggcctctccctcagtgtcctgctctgtgctgacccagctggctaaggaatacaggactgaattgatgggttgctctgccatggagcccaggtacataaacaacgctttaactcaaagaaatggagtaggggactacggaaacatctgttgtgtgttctgcccagtctgggtgttgacaggcaggactggcatctcggtctgggttgtggctccctacctgctctatctgtgttgtgccagcgctcccgaggccacggcttgccccctcggggtggtggtgtgctgtagcagggttttggatggggaccccctgaccccccccttctgggtggaatcacagccacagatccctgaaatccacctgtgctcaggcctgcctccgtggcgtttggtctctcgggcaggctttagagcttagaagtctgtccaagttgttcccatgccacaaaccagggattagggcagccggctgcctgctggggttttggcttcgtccagcctcacagctgtgccccctgcacctgtcttagtgcctgcctggccttggcagtgggaactttgggctgaaaaccaagaggctgaagagggctgaaaggggagaagtggccttcacttgcttcctcccctgaaatggatgctgcagttggccggctcggccgggccccaggggtcagtgtgaagtaggcacagcccgaagtagaaccgctccccacctgacctcaccccaccatccatctcccggcagggccatgcagctcccatcctctacgcggtctgggctgaagctggtttcctggccgaggcggagctgctgaacctgaggaagatcagctccgacttggacgggcacccggtcccggtaagtgctcctgccagagcctcccatgcctctgcctccacttcctatttcccagacatgtgggacgggggtagggggtgcccactgagaagccaaaggtgttgaaaggcggaggagggcattgagttgaggaaggaaagaagcaggtgttttggggacacgtattcaacccaagctggtgccaaaggggaaggccttctgaggcctcagccagggtgctctgggatgacttcagggagggcctctccccaagctacccttctgcactgggcctccttggctaggtagctacagcttgggaagagaggggactcgataagggagtggctgcaggatgctggcgaaaccctggggaagggacccagtttgttccttggggtgccatctggcatccctgcaaacgttaagacttcatggattaccacaaaaactgtcacatggtctgggtccccacgaggggcaaatgttctgtcaattttttcatgattctctctcccagcactttgtgaagtgggtgatgtgggaactgaggctcacagaggttcagtcccttgcctgaggcctgaggccacatagctggctagtgggcagggctgggatttgaacctataattataattagttcattaggagaagaagtcacatgctaggtagaggccatcctggggcctgaccttctgcagaggaagggcttgctgggctgggtgggagtgtggctccctaggcgggtgagaccaggatcccttctcctctcagattaacggtggccttctgttatgacagaaacaagctttcaccgacgtggccactggctccctgggccagggcctcggggccgcttgtgggatggcctacaccggcaaatacttcgacaaggccaggtaacacacctactccccacccccaacctgggtagttttggggagtggtccttgggtgacccacccttcaccatcgcccccagactcttcctctttcctggctagggcagagtaatacatatgcgtggcctcttttgctctttaaacatccgctatggctggtgccatgaccggccccctttacaaatgaggaaacactcaggagttaagggacctgccctgggtccctcagcagtgactggcagggccaggtttgcacagagtgcgtgctctcaatcatgtgctcttcagccagagtgcttaggctgaggacttcctgttttgcccccagccctgtgcccagaccccagaagtctcagaaagacccacccccaggcccctgtctgactaggcaccaggagcccaggcctgagccacttgcctttatcttggtaaaggggagggttgtatgttctgaggggttctgggatacctgtaagccacctcctatcagcagggaagaaacaaacatttgagagattgagccttcagagggtgggtgatgagcctgaccagaaaggtgtgctgctctagcgcccaccaggtgatttgtaggaacggccccccaggaaggttctagccataagtttgtctgcggtggtcagatatggcctggggggatgaggttgtaaactgttaagaataatggctggctgagggaaggattgcttgaggccaggagttccagaccagcctaggcaacagagcaagactctctctacaaaaaatacaaaacttagccaggcatggtggtacacacctgtagtcccagctacataggaggctgaggtgggaggatcacttgagcctagggcttcaagattatagctatacatgattgagccactgcaccctagcctgggctacagagcgagactctgcctctttaaaaaaaaaattattcttttttttaaagaataatcactgtattagtctgtttccacactgctgataaaggcatacccaagtctggggaagaaaaagaggtctaatggacttacagttccacatggctagggaggcctcacagtcatgctggaaggtaaggaggaacaagtcacatcttatgtggaaggcgcaggcaaagagagagtttgtgcagggaaactcccgtttttaaaaccatcagatcttgtgagacttattcaccatcacgagaacagcatggggaagacctgtccccatgattcagttatctcctgctgggcccctcccacaaccagtaggaattacgggagctacaaggtaagatttgggtggggacccagagcctaaccatgtcagtcactcatcagaagggttcctttgccctttgggggctaggccctgtgctcagtgctcatgtgctgtattgggttccacctttaaaagccccctgtgagttgggtagtggtgtgagaaccgtgacccgtcttacaggtgaggaagctgaggcaagatgctggcctaggccatccagttggtggtggaggtacccaggctgctcttggagaggctgagggcaccacaggagctcggggagtcctgtgggcgggaagcctcctagaggaggaaggccagtggggccagcccgcagggtgtgagaagggcccagttctgcagctgatggcatctccactgccctgtcctccactcctgcagcagaagtgccatagtggggttcgggaagactgtgggtccttgaaggacaggaggctgcagggagcaccttctgtgtgcaggcccttccccaggactggctctccaaggaggcctcacagtcccttccagaccccttcaggccagtgtcacctgaccacagtttgctttcattccttggtgagccttggggcaggcttggctacacccagaagtgattcaccatgaagtaaagagagagagacacacaaagaatgagatgcatgtttaagagcattttatttggcagagaaccagagatgtgagttaattattccctacagttgctggaaataattccctgtgaaggggcatttcctgaccctaacataatggaacaagtcagtgtagggagaaggagtttagctgggttcccagaagccagggtggcttggggccagggttgcctggagcctaggcccctgactgtacctgggggaaggggccagggcatccagggattatcatgtcaggccaggcacccggaggtagcgtcttgatagagcaaactggtctccactcactgtttctccctgccctcctgtttaaaaagtacagaatgatattaagaaatgaacgttttccttatttttttatttttattttttctgagatggagtctcgctctgtcacccaggctggagtgcagtggtacgatctcggcccactgcaacctccgcctcccgggttcaagtgattctcctcctgcctcagcctcccgagtagctgggactacaggtacgtgccaccacgcctggctaattttttgtatttttagtagagacgggctttcaccatgttagccaggatggtctcaatctcctgaccttgtgatctgcccacctcggcctcccaaagtgctgggattacaggcatgagccactgcacccaaccaatgttttccttattcttagcacactgcctcccacccccaatttaaatctaatgatgtattttgtccatgttatcatgagaaaagcttacaaatctgtaatcccagtgtgtgtgtgtgtgtgtgtgtgtgtgtgtgtgtgtgtgtataatataaaatctagtattacactttaaaccaagccttctatcatgagctttttctcctgatattaacagtggagagctggttttttttgttttgttttgtttttttgagatggagtcttgctctgtcacccaggctggagtgcagtggtgccatcttagctcactgcaacctccgcctcctgggttcaagtaattctcctgcctcagcttcccgagtagctgggattacagacgcgcaccaccacactcagctaatttttatatatttagtagagacggggtttcatgacgttggccaggatggtcagtctcaaactcctgacctcaggtcatctccctacttcagcctcccagagtgctgggattacaggcgtgagccactgcacacatcctgagagctggttttaatgatcacataatattctgttttatggagatgctataatccatctagccagtcctttgttgttggacacgtaaggtagtttccaaatcgttctacaacaaatgtcgaccttctgtttagggttccctctcttcaaattagttcatgaatggatgtttgcagccccccacccctaactctaacagctcaggcaataccaagcctcagggttagcccaggctcctgtaggccccttccctgttcacaaccccttccttggcatctcctcgggacctcagcacgccctctgacctgagcctgatggccctgtagggcttagccttgtccctagtctcgaagccaaagctgtgctgggcctccagtgctagcctcggttcgacttccctggaagtgggtgtgggcttggggtggcagccagttgccttccctggaatccctttctgggaagtcgagttggcttctctggctcagccccatcatgtggcccctttctggagctgctgtgccagaccagagtccctgcagggtctctgggccccctcaaaacctacaggggaaagaggaggcaaggctgggacaggatagggcctctgaagtgtgggcctgaggctttgtccttctggccatggtaccccacaggggcaccacctcctgtggtggaggccacagaagagcagtatgaggcaggagaggctgcagggagtgctcctggcctgctggcatgtggaagtgctgagtcatgctgacagctccgtggctagctgtcccagcctcttcctgctgcccctgccttggccctgcggcagggaggcctggaggcttggactgctgagcatgcagccgggttgagggccttttcctgcaggagcaggagggcagccatgtcccctctgagcccaaccaggcaccagcctcatttcctagggctacacagctagacactgggcagggtaaggggaggtccccaagtcctaccactcctcaccctacttgcatgcctgcacggcaaggagcggacagtctaggctacagtcagacctgcgtttgaatcctggctcagcaacttcctgacagcgcgaccttcagacaagtcctgtctgttgctgccgtccctctgctacccccatcccctcacatctcccaggccgggaacgttctgtttgctgggtaatttatcccaagttcagtgttctttttaacgtctcactgtcttgaaaagatcacagttgcctgtgttgaggggaggagagggcccctgtggtagagaaagagccaggtgcagcttcagtcttggggtcaagagctagtcttggaagcttggggagagcctgtcccaggaagcgcctggtcctcaagtgccctctgctctatcctccccagagccctcttgctccagggtgttgcctagagtgcctcaggcctccttggcccacctccctcctccgggcagaagcagagcttggttcccaaggttcccctttcccactggcccacccagccagtcccaaggcctcctccaacctctggttcacagcggggtctgtcccctgcagcaggtggctcaagcctattcacccacccttcctcactttcctctcattccaacaacccccatttttctagatcttattagccagatccctgttgtcctagacctctgtttcttaacaaccagtacttcttcctgagctcctgacgtcttccttcatgccattttctcttggggtgtggcttgtggtaggctgcaggaacctggtgacactgttgcccctcgagtgtaaatgccatctgttctgcatatccatgcgtggctgctcctttacccagaatgcaggctccttggatgggtgggggggtgggagccagctgggtccaggtgagagggactggcctgattcactctctgtccacagctaccgagtctattgcttgctgggagacggggagctgtcagagggctctgtatgggaggccatggccttcgccagcatctataagctggacaaccttgtggccattctagacatcaatcgcctgggccagagtgacccggccccactgcagcaccagatggacatctaccagaagcggtgcgaggccttcgggtatgtacgaggctgtggcctgagtgtggtcacagcacgggagagtggtctgtgatcacagctttgcaggtgcaggtgcaggagctgaagctgggaccttaagcaccatctaaaggtccctttctttagcatttgactcacaatttcaaactctaggcatttggacttaatggctcaggatatgtgggccaggcccagttttaagtgagtttccttgttttcgtggttgtggcatggtggctctcggagcttccacacaccatctcacgtcagctcgctttgttcttgaggaaggagggttcttgagggatgggggcttgctcggtaaagctaaaggatgtatagctgcggagaggtttgaacctcagtttggtggccacgtcctgtgcccagccccgcccagcctggggaggaggaacaggctcctggtgaaatgggagatagggtttccagatgccccccttcggccttgattggttacaaattcagggtcaaagggcacaaagcagggaggtcaatctgcatgggtgtcagccagaggggctccacctcaaagcctccaccggtgttgccaaacacaagctgctctgcacaggggcccagcattggctgaggaggctgtggaggggagggagcagggcaggtgccgtgcaaggctttgagactcaggtcaggcctccaggactgcgttttgcggatgaacccatgcctgtgactacactaagtaacaggatgcttggggttaccttgcagtagcacagcatacgcaggcctgtgttccctgatgactgacctcagaaagggagaggaggaagggaggaaataatctctgttggacaggcgaggaaactgagccacagggtcctcaccccacaggcctccccaaggccacatctatctggggactcagagtacaaccccagcagcacccccaggacctgtgtccataacctcgtgactcaagccagattcctgaagtcctggctccaccgctaacttgctttgtggcgtgggtcacgttacttactccaccttcggtgtctcagttgatttgtctgtacaatggggccagctcagcacccaagcatggcgtggtgaggcttcagtgggctaatatgggtagtggttggcatggcactcagtttgagaagtgctatttttattcttatgtcaaaaagagtccccaaaaggatagcttttcaagagaaagggtgctctgccccagctccttcctgtatatttgactccatggttcatttcaaaaacatttccagcaccacatccagcatctgtggagtgatcaaatgtgttccccaaataagaattgggccaaaaaattcatcaagaatctaatagcagacagattccaaacccagtgcgctgaccccagaacagctttcagtaggaaatgagcagatcaggaatgaaagagacaataaaggaactgagctctggattacttaagaggaggaggaaaacctgttcagaggcaaacaaaaggaagtaaaataatgtgaaaaagaaaaggatttaaaaaacccaaactggaaacaggaatgttgcaagctttctactactccagctgaggccgcagttgtggggtggagcctgggcagaccccagctgccaaggcagacctttccctggaaggctcctcggtgttgtggcccctgggaattgccccttactctctgccccctgtccccagttggcatgccatcatcgtggatggacacagcgtggaggagctgtgcaaggcctttggccaggccaagcaccagccaacagccatcattgccaagaccttcaagggccgagggatcacgggtcagtatgcacaagccgccctccccaccttcacccctcgcccagacactgtggctacgtagctctgacccgcacatccagggaaacagcccttgctgctcactgagctcaccaggctccagggaaggggagcgggagatgctgtgactcagtgacccctgtggctgagccaggatttaaactcagatccgtctggcctctgccggtgggggcatgtacaggcaggaggagaggagggacttggagggtctgtgggtgagaggaaggtcgtggagtgaggcagcccccgtgccccaccctggctggtgcctttcagagctgcagctgtgtgtgctctgccagctccggccacctgctccagctgaagggccgacacagagccaggcagggcccggagagaactgttccctccaggaggtgagtggggtactcctcaagcaatggcagatgctgagcaaggcctgtgtgggccaagagccttggggggtttggaacctgggttctgccccaggccggagaatgaggcaggcgtaagtcactccctggcacccaggtgtgggcttcagattcctaggcctgggatggcctcacccattttaaagatgggaaaatgagactacaagtggtcagggacttgcccggggacagaggaagtctatggcacgaggggggctgatcccagggcctgggtcggcttccctgccaaatgcccctggctgcccacctgcctgctctcaggggttgtggcttgttctgcccatgtagactcaggtatatgaggatgttctgagtgggggtttggcagtgctgggaggtgtctgggagggggtggatgtcgaggaaagggctctgggatattgtcatggctttggtgctgctgcctggcactgccctctggtgttaaaaatgggcaggatctggaccacttgcagcttcttgggggctcctgctagtctttcgggctgctgggtgctacctgggagttcagtctgttcttggctctggccagactctagtgactactgaggtgacctccagggagagggatattcagccttcctggccgcacacaacaaggtgccatggggtgggcatgcctaggtgcttatagactcctctgctgctcacagatgcattgggtgaccctggaagccctgttctgggccttgggttccccttctgatggccagggtcccttccaacccagtcgacaaactgagtatttctgcagcagacacctctacctgtgtgtgaccctgcaggcggggttgtggggaggaagagaatggacacattggtgaagggatggggcagtgggcccagaaacacacacctgcccacgtctggcccctcctttcccactcagctgtgagctcccaaaggaccaggcagtagacagtgagtggtgggcacgtaggagtccatcctattcactgcgaccctcctttcctggcccccgtgcctggctgggctctgcctgtctgggatgatgccattcctcccttgccctcggcaggtagagggccagtctcctggagcagcctcctggccctctgggagcttctgtcttacccattcctctgtcctcccgtgttgggtctgcaggggtagaagataaggagtcttggcatgggaagcccctccccaaaaacatggctgagcagatcatccaggagatctacagccagatccagagcaaaaagaagatcctggcaacccctccacaggaggacgcaccctcagtggacattgccaacatccgcatgcccagcctgcccagctacaaagttggggacaaggtacaaagtggggcctgtttctctgaacccatagttctcaggtttcccaagtctgtggcccagatacaccctctggagggctgggaaagggaggagagcgattcatttagggcgaggagtgatccctgaggtgttgttcctgtcacttccctcagaatgacagacatctctggagttgacctgcagaggctcagaccgggcaagggaattgcccacttagcaagcttagcaagctactgacagaactgagatcaaagccaaggactcactcccaagttcttgcatcgctggtccacgagggacccttggcctgagctcaggacccccacctgacctgggaaaggctaggcagagctgtcccactccaggtttctgtcccaagggaacccatccatgcagcctgtgcctggccttgactcccaagccttctgtgttcccatgcaaagtggaataggttcatggacctggtgcagcaggcgggaagttggggctggtgggtgtcttctgtagcttatacctttcacagccagaaggggccggggctccaggggctcccaagacattgaccgtagtcgttggcaacctttcagcagttaaaagcctctgcaggaccttgtgctccagggcttccatttttggccccgttttaatccttctctgaaagcagggctccaggctgcaggtgtgcactcaccctcagaggggtccagagccttcccactctcttcctcacagatagccacccgcaaggcctacgggcaggcactggccaagctgggccatgccagtgaccgcatcatcgccctggatggggacaccaaaaattccaccttctcggagatcttcaaaaaggagcacccggaccgcttcatcgagtgctacattgctgagcagaacatggtaggtgctggggccggcagggacaggtccacccaaggctgagggctgtggtctgaggggtgcggggcagccatgttggcagagccaggtgcctgctgtaggccagcccagggagactataagaaaagccaggacccagcgttaacccctgaccttgaacagccacagtttgggaggttctgcccaggtgcaaatgtcctggacaggtgtgcacatgggggagccgaatgggactgcaggtgctctcaggaggagctgcgtacaggccaggcctggtggtgaatggggtctcttccaggtggaggacaggcctggccagtaggtggggccgtgatgggtttagcagcccgagtctgtagagcacctgtaatgcacacggctctgggccctgccaccctgagggatgcagagatgagggaactctgggcccctgacatgtacccatttggggaagcagacccttgtcaggaactgaggttgtgaagtaaggaacaatgttttgtccatgttttcaaaatatcccctcctggtggtccaggagcccagcctggcttgcaggcccctagggacagggagcttcctctctctggagggcactcagatctccagagttcttccaactggacctgaaattctctctgtggtttccagagactgctctgcagggcgtggggctggggaggtcccaggtactagggaaagaggccttgtgttggctggcagattttggagccttgaagggcagctggtttggaactgatgactgtactcagtgctgcttctggatgagtgatttggggcctggagcctcagcaggcatgaggctgctgccctcggaccccagggaggggttgggaggaccggtctctgcagaagaaggtggtgggggacatattcagaagcccagaaaggatggacaatctatatacaaattgtggctttctccacaaaaggggtcctaggctccccgaccaccctctgcctgcccctttgggctgaccctgtcccacctgcccccaggtgagcatcgcggtgggctgtgccacccgcaacaggacggtgcccttctgcagcacttttgcagccttcttcacgcgggcctttgaccagattcgcatggccgccatctccgagagcaacatcaacctctgcggctcccactgcggcgtttccatcggtgagtttagccagggtgtttacacctggagctcccttgacttttgcaccaggaggtatgggagggggatgggccaggattccagcccatggatgggggggtaggggtcttatttctgcatatcctttcccccacaccccaggggaagacgggccctcccagatggccctagaagatctggctatgtttcggtcagtccccacatcaactgtcttttacccaagtgatggcgttgctacagagaaggcagtggaactagccgccaatacaaaggtaggttgcatggctgttctttctcctgctggcagccatcacttcccaagggaaacagaagaggaggccagagctggtcacttgctgccccagggggtgtttcctgaccttgcccctggtgttcgtgtagcttgtggaagttagacaagaaaaaacgaaatacacaccccacttactgccacgtggcagacattgtcaactgattgccagtctgtctctgctgagaatcctggcagccctggccggtccagcggttgacacctctccaccctcctgagttgggttctccaagacaggcaaggatgagctgagccctgtggtccaggcccggagctgcatgccacagacccagtgcgcgtggttcctgcccctctgcctggtgcagtctgtgggagtagcccacctgcagccagtctacctggtggaaagttgccttcggtctgaggctgcaaggtggtgggcagttctcagagtgttcaagtggggtgcgggcggcagagggcaagcaaggcccttttccctgctggagtagccaggatgcagtaactaacgctcccatgggaagggatggcctctctagaaagacctcgtctctgaggttgggtgtgccacatcctgtatcctcagtttatctgtttcggtctcagggtatctgcttcatccggaccagccgcccagaaaatgccatcatctataacaacaatgaggacttccaggtcggacaagccaaggtcagtgcctcgcatgccccaggagcccacagagctgcctggaccctccctgctgtgactcccagcagtcagggcacaccctgccccagggccctgagccttactcaccctctgtgtcacccccaggtggtcctgaagagcaaggatgaccaggtgaccgttatcggggctggggtgaccctgcacgaggccttggccgctgccgaactgctgaagaaaggtgaggagaaggggcctccaaagtcatcaactgagcggccactgcatgctaggtcttggggttctttctttcgttctttctgttctttcttgaagagctcacagctagagagaaagcatttcatttcattaaataatgatagcaattatagccatcctttgagcacttgttctgtctggcatgttgctaagtcctggggctgcagtgcccacagtccctaccctatgactctaaagtcgagacccccccagcatggtggccagatcagtggcctggagcctgccagctgggctggaatcactcagccaggcactagttaaggaagtaagttattcactgtcaccatgcctgttttcctatctgtaaaatggagatactagccccttgccctcagagctctcctgagggttacatgcatgtgacttggtattctattattattactgcgagctcacagtgttggctagtggtttgtaggggagacaggcattggcctctcctgcaatagaatcacacagcagatgtcatgttttagcacgaaagagggggcaggtgtggcatcttccagaaagtggcttcagagtgggtaggaattgattagcagagaggagagtgaagggaggccggaggagggtcaggcaggagcaagatggggctggaggagccagaggagtccatccccaggcagggggagacccaggggggtgagctttaagcagggcctggcaagcgtgggtttgtccttctgagaaggtgcctctgctgctggggccgcacgtgggcctctgatcactctgcgggctgcagctccccaacgtcaccacatcaagcctcaccttccatcaggccagacacctggggtgttttctctcgcattccctttgtcttcaaggttgtgggaggatgagggaaggcgctcagggcctgcacgctccgctctgggttcttggatactgcgggcaacacagctggaccagatgccccagtgcaaggggttggcaagcatgagctcagccatgggaacgaggtggcaagtggttctccctgggacagggacaggcccgcaggctgagctcttagctacacgcagccctcaggatgtcccaccaggcccccaccagggcagatagtggtgcccagccctcccctcagccacgccgtgtgctctccctcacagaaaagatcaacatccgcgtgctggaccccttcaccatcaagcccctggacagaaaactcattctcgacagcgctcgtgccaccaagggcaggatcctcaccgtggaggaccattattatgaaggtaaggaggcctggggcaggcaggctgggcaagggacagggccagagagccgagcgttggacgtgcctcttctatctgagccccaggagggcagctgtggcccagaacacccagagctgtccctcagagcagctgggacgtggtctcttaaaaggcctcaggcttggcctggggacctagctaactcacagctgctgatgagctctgtggagctcctgctgcccaggaagctggtgaggattccaacctcgctgctaaatggtggatggtggcgtccctgaggtagtgtagggtggaagctatggtgcagcttgggaagcaatgcagaatttctggtatttgtgagtccttcacacagcaggctccctaagtacacaccagcctctctaagtaggaggccccagtgggagagatgggctttgactctggggtcaaatgtagataattggactatggacagtggctggctggtcaccaacaatggtgtttgaaacaaacatttagaggccatatttgggcttataaaaatagttctgggccgtgcatggtggctcacacctgcaatcccagcactttgggaggctgaggacagcggatttcttgagctcaggagttgggagaccagcctgggcaacatggtgatacctgtctgtctctttaaaataaaaaaaatcaatgagttatgtgatgggctcatggctacaggtggagaaaggcagtgcatatgcagcctcctccatccttgactaaggctgacagagggctgggcccaccactgctcaccctgaggcctcgtcttctgactcccctcctttcatttctaggtggcattggtgaggctgtgtccagtgcagtagtgggcgagcctggcatcactgtcacccacctggcagttaaccgggtaccaagaagtgggaagccggctgagctgctgaagatgtttggtatcgacagggatgccattgcacaagctgtgaggggcctcatcaccaaggcctagggcgggtatgaagtgtggggcgggggtctatacattcctgagattctgggaaaggtgctcaaagatgtactgagaggaggggtaaatatatgttttgagaaaaatgaattggccctgaaatgttttcttttttgatgtgtttgcagccagtgcaggttctggggaagaagcgtggagggtgcgctagggaggctggtgtccttggtcctgggccaggacctgggtgtcccaagtccccttggaatcacctgcaactgccctcaacctccagaactatcgctgcctcccattcatcaccaggtgacatttgactgcaacctgccttctagctgagaggctgagacctacatccctcattgtgacctcagtccacctggccctgagcgggctggggaactgcctcagtctggaagctgaccaggcactctcagggccgccccacctcccccaagtccccacagccttgcagtcaggtctcctgggatagggaggttcacttgcttgttgtccctcgtccttgtcatatccttttaactaggcatctcagagaagcagagacagggcagccttcgtcctgggggaaaagggaccctcaggatggcatgagaggtcctcaatcccaagtgtggaactgtccccctcaacttgttaaaatgcagatttctgggtcttgccaatggggcctgggactccatgtgacaactggcccaggagcttctgatgtcacacagaattctgcagtcccaagctccagccccgacctgctctgctgttcctaggtgactgccctcacactgctgaccacagtggatttctccccctgctgctcgggctcagctggggtcagccctgcttataaggtcaactgtgcaaaaccttatactggccaagaacaaactagtgctgggggaggagggctgggtgccccggccactggtggagtccccaggaaatcctcagagctgttgcgaggatgagacacatttgtggacacgtccacctgtcctcctgaccgtctggagagaataaacctgtcaaagccaaggtca

SEQ ID NO: 14 - DNA, 166118 bp, Homo sapiens
attgcatttctggacgcttctagacagtgttcatacttggctgtctggtttcaccaggaactctacccaaaagaggaaacagcaaggagaacatttgctttgtttgtaggagggaagttgtcgagctacaaacaaatctttaggcatctgaggaattgctaagtttctaatttcatatggttgctgacaaggaggtgcagacaaggaccctcttgctttcctcactatggatagtctgttgcctccatctagattctcttatttcaaaaaatatcctctccatgcaattaggagatatttatcgacgctgagaaaccaaagagccgaagaacaggtatcattttgtttatattatctttaaaatgaacgggtgcttgttccttgttgcttttacgtcgcttagtgatttcatttgtgctggtttacatgtttataggtacaggtcagatcctgcttgtggctgttcagacttggcaatcagaaagcaagcaggcttgtgagaatttatttaaacttggaacattcagatcctgagattaagcggagttctgtaatgaagccacatgctttctttcttctaaagagctactctatcaaagttaaattttgaattctttgatcattttccaatgcctcagatacaaaatttgacactattaatatctcaacaaagaaagtatcagaccctagaagtacacttgtcttcttgtatttatggttatgtttacatagccagaatttgcaaaacaaaaaacattttataaactataataaccttaaacagatcattaacaagctataaagatcattcagaagcagttggtcatttttgtgtgtgtaaaaggtaggaggtagagcactgccatattcagtctttttagccaatcaaaagctatgatttccagcaggagacactatcacttgggaatataagcatttttaaaactgttaaaatgtctgatcacatctcatttaaaatcatgcagtcatttttatggtgtgagatttatatcattccatttctttgatctccaaaaaagacatttctaaaaatgatttttatgaattttaccaaattgttagaagaagtagcaatatctgatccatttaaatctagtgattcatttaggaagaagtgtggcggtggtatacaaatgtgaaggacaaatgtatagccataccaaagacccagcagtcataaattgcttgtgcattgtgcttgtaactagaactgcaaaactatgcaggagatatcaccagtgtcctgtatttttttctcctttgtgatatgagatgacccacttaataaaacacttccaggaaatgcaagataggtttagcagacagaaaatcctctcatgacaggtttcccaaaaaggcaatgcataatttggaaaataaaaatcattgctactgtttgagaggaaactgcttgtatgccctgctttaataattttacaagggccagaaattcaaacagactctgttcactaagggagctaggctggtccagtttatcttacttaggcaaggtgtcaccattaaaagaccaacttttggtttccaagtttcagcctgcacttgcttttgatgtagaaagctagagaaccaagtggtagggctgtataagtttttgtttgccaatcttttaatgttcacgggcttcttcaggcctcatttattatggaaggaagagaggtggctgaaaggatgggaacacaactgtggaatgtgaattgagtgattttttttttctcagtattgtaagttttcagagatgtggctatattgcttgtgtagttctatggttctttgtttttagtttattgaagaagtattacaaaatgcattcagaagaccattagaatttaacataaaacctctgacttggacagggtgggtagtcccttccccagtgtacaaccatttgggacaacctaggaacagctgggagtgagtattatgctgagttcttaaattcttatataagtgaattgaataattaagagaaataatatatttgatttctttttaaagccaactacagctctgcagacctaatgtctcacagaattagagaaattaggtcagagttcatcataactaaccttgaaagcttgttgggaagttataaaggaggttaataatgtctacaatcttatgacctgcatatttgttgcctctaatccttacattcttgtataactaatccttgatataaaagtgaagggattgagacttagagcccttaagagcccttgcccatgcagctagaaagtaccagaggaagatgtgaatttctatctcatggctttaaattttattcattttaccacgcttgatccctgaacaatctagtaatagcaaaatatcaccctgctaacttttctccttgagagatttctaaaatttcctatattcacatagcactgtcataatttttactgtttaccacatctgtatgattaattcctcaatatttttctgtatttgtacttaaatcacattattagagtttatttagaaaaaaagttcatatcatgactgtaaatggaaaaccattgtcattagccgtaagtaaaaataattaataaaagcaaaacagtattaaattctaggtagatactattgcctgtaaaacctccaagcctgaaacctgctcatttgttaataaggaagattagcttttaagagaaaggttagagcatcctaggagccaactgagaaagtttcctgggtgaggatggaaaggaattaaaaggtagataatgtttttcaatccaaaatgattcagtgttattgaatgtagtgtctgcatgccacttaaaatcttctcccacctcacttagcgctgctaagtaccaaccatgttgacttccacatacttggggaatattataacagaacaccatctgcttctttacttttgcacatttaaatgaactcccccctctagcctagaattctctcctttacttacaacttgccctcctggaggtctcctgtacatccttcaatacttggattaaatgggctcagtgaaaagctttctccagtgctgctgggaagaatgaagtcttccttttccaagatattttgtttgcttcagacacagcccttactacattctatgtagtaaatcatgtgatttcatgtcgatattcgtgcacccatgcacacatgacactggatgttatcttgttctttgttccctgaggcatactggagcctggcagatactggtgtaaaggtgacccacacaacaggcagagggtacacactggattgactgtgacacagacctcctttgttgtttttactaggcctagaagttccccataccccttttctgtggtccaaattatgatcattgttacactcaccttgttcacatatgctttattgtttaaaacttctcctagtgctcttctcgcacttggtgtcatacagacaagaagatttgacatgagggttgatttgtttggtagctttttctggtggtggtagtgttattcctgtgatacagccatcaataggttggtaggttatttatcaaattgagaacaaatatttcatcctttgcttccctagattctcttgcagcaagtgtttcacaaagccaaatccccacatatgtagaagattaacagcattaatgagatgaagatgctgaaggttgggaaaatttgttaacctttctctcagaattattcaaatggtgtggtagtaacagtggtggtggtgaacgttgggcagcctgagcctaaatggagtctcagatgagtttgagtaggtgtgctgaacgcacgcataagggtgtttggtttcggttattttattttggtctgagggcaacatccagcacctggctcagatgttggtgtctagtttataaggaatgagtgagacttgcaggcaatgttcccctaagtactagagactcagcagcctgatctgtggctcaggtgatcaagcgggacactgagtgtggaagggagaatttgctccacttctgggctgactatagtctagctttagcctggagatgcctgccaagaaccaaatacctcatgaacccctggggagtactgctcttaggggccagcacccctgggctacatatgggtgctagcaccaaacaatgagaagacagtttgtcagctcatgtgggacagtctactctctctccttgggtgagttcttctattcccatggtttcaaacacctatttgctgaaaactcccaaatgtttatacccagagcacttcagccttgcatccaatcatctacttgatatctccatctgaatgtcttgtgaatgttgcagactgaatgtgtccaaagagaattccacaagctccaaacatgctcctccccaggtttttccatcaatcaacacaaaagctcaaaccagaaacctgggagtcaccttggcacctctctttttccctttctcccccttacgtccccttcctaatcctttagtaagacttctaaaatagttattgaattctccatcttcacccttctaatcctgccaaccatcttttcttacttgaactattgcaatagttttccaattcgtgtctccatgttcactctggttatcctacaatctgtgtctcctgtagcagtcagaattttctgctttaaatgaaaatcttattttagctcaatgcggggaatatgatattattttgtttgctagtttagtcccagtgctaagcataaatctggcacatagatgataaattaatgtaattgaatggaaaaaggggactttgtaagtattagagaagccgtggggttggagggttcacggggctgaggtgtttttatgcaggtgagggtaagagatggtgaaaatagggttattatccttagtaagcagaggctgttgagatctaggggaaatcatgtagaggaatttattttacagacgtgaaactagtgtcacaaactaagagatttgcccaagctcgcatggctcatctgtgtcagtgctgggattagaatttggttcgcttgactctcattctgttatgtatagtgaacccctaagcagagatgtagaaaaaggccatatgagaaaaaaactctacaggatgggtccagagaataggtgatgcctgagggtcaacttgtcaacttgtcaataacaaataagacgttttgatgagagactgaggcagagcagagcctgctcttttttgccttgtccctcaacttacactgcccttcagcagcctcgccagtctgaatccccacttctatgtgtccctgcaggaggaaagccgagaaggagtcagaaaacacaggccagctaatttaatctacaagaatttgggatgacctgtaccaatgtctcgctctcttgaacagagattttttttttcctgattgagaaataccattcaagggctgatctgacaagtcttgcctgtttaacagtgaatctgcttaaaatgaggagagtggtctttgggcccagggggcatgtactgtagctacattttaattacagagtagaatcaaattttgttttggaagctgttctaaagtttcctttcaatggcttaagaaaatgtttctagttggaacgggatcactggaattttttttctttgctgctctgtttcttaatgaatgctaacctcaaagttgcactgttaaataaatatttgaatttaatttgaattttagaaacttatttctgcattttggctctcatacttactctgaatgatactataaaaattaagaactccccattccaaagaaaactatattgagatttccaaggctaaataaggatttgaggttgctgatgtaggctctgattctctaggtaaaatgatagacgtttcactacaacttgatttaagaaatgtttttagctccataaagtcagtaagttggttatatcttgagtgtataccaaagctattcattgtaaaaagtctttttgaaaagtcatgaaatgctatccattgtcagttcaaatgatatttgaggggaaactaaaagtgcttctccatgtccccttagccccatgcttatgatctttcattggcttccatttgctttttggatacagacaaagctccctaatgtggaggggtttgtgtggtccagctctgattctctccctgctgcatgttgaccttgccccctgtgcttgtgcttgagtagaaaaaatttcagtccttcacaaacaggaggaaaagattttccttgtagaacttaataaatgttatctcatttatacctagtgttccattattggaacaataagcatgtgggagttatttacatcctactgctcaaggccatcgccaaggtctgattgcaaaaattcaaaaaattgtaactttgggcacaaatgggttaagatagaggacagagagtctatgccactcctgtggaggaatttgtataattatatataggtaacattgacagttaaattgtgacaacatgaagttgaactttaatatttctgattattaaatgtgacattaaaagtggaactattttattatggtaatgacaaccttttcctctatctgaagggagaaattttttaaatgagctatgtatttaccaaaaaataaaaagctaccaatggtttttcacattatctacaagatgcctgagagttatcattgatagcttgcataaagataaatggctttctagttgtcagcaaccaccctcatggtctttctctctcccaaatatgtcttcactatctaagaaaatatcaccatcctgatatttaggcagaggcctaggttcatctttggtgctttctgctcccttagtcaatatttaatctatcaccaactccattcaattctacccctaaaaaactcccaaaccggttggtctacttccctctttcaccaccctagcccaaagaccgtcattacttcttgcctgaaatactgtaataccttcctcattggtctcccagtaatccacactacagtcagagaggtcttctgaacactaccacctagccccatgcttatgatctttcactggcttccatttgctttttggatacagacaaagctccctaatgtggaggggtttgtatggtccagctctgattctctccctgctgcatgttgaccttgcccctctgtgttagttagggttctctaaagggacagaactagaggatatttgcatatatgatggggagtttattaggagaattgactcacatgagtcacacgatcacaaggtgaaatcccacaataggccgtttgcaagctgaggatcaaggaagtcagtctgagtctcaaaacctcaaaagtagggaagctgactgtgcagccttcagtctgtagccaaaggcctgagagcccctggtaaatcactggtgttaagtccaagagtccaaaagctgaagaacttggagtccgatgttccagtgcaggaagcatccagcatgggagaaagatgaaggccggaagactcagccagtttcctcatgccactttcttctgcctgctttattctagctgtgctggcagctgattagatggcgcccacccagattgagggtgggtctgcctctccctgtccactgactcaaatgttaatcccctttggcaataccctcatagacacatccaggaacaatactttgcatccttcaatccaatcaagttgacactcaatattaaccatcacaccccctgttctctgaaccctagctatagcacacttcttctatgtatgcaagtttccctgctacttcctggctagggcatctgttccaataatcatctttctatcctccctcagttagtatctactcttccttcagattttaattcaatattaactcctttagagcagccttttctgacttttccaccttgcttcattacatcctttgaaggcacttggtaactgtcctttgctgtatttatcctagtagcaatttcgcatctttctgtgggggctatttgattcccgatgtatcccaggtgactagcaaagtgcctgacagatggaaggcactgaatacaagtttgtggaattagtgaatgtggggagtaggggtgcaatgaattctatcttgagactgaagtacttgaaataatcctggatgttagactttgtgaggaagatacatgactgcttttgtatatgtgtttgtgtatgtgttttgtaagaatcttagggctgtagtaccagaatggctgagtgattaaggtattggacttaagaatcatagggctaattcatgaagaaagataggtatgcatttgggaggttccggaggaaataaccatgaccaatgggtagaattgcagggagggattatgatatactaataaagatgaactttctaaaaatgaaaggtaaagaaatgaattatcttctgcagagtgcgggggtatgtgacccctccttaggggatgttgtggcaatggtttctgcatcataaaagagaagactgaatgacttattaggttccagctctgatattctagtataataggcaatagagagatgaacaattcagatattttagaaataaggagagggcagagggcatagatgtgtagttaggattcccgttttatttggttagtggtaaatactccatagtcttagcatgttgctctagagtctaagaccaaagaagacagaatcaaatgcctttggtgattagagtagcatgtaattctccgtcaaggtaaaaaacaaaagttacatctagcaaagacctcaagtgaagagctatgtacctgtgactagcttttctaagcctaatcgaccacttaactacttctaatccatagtttgtaagttatctaaccccttccagtataacgataaatagctaaatatacatagcagtcattgataaatgggggtgccaagaaatttcaggttattttgtggcactttaaccactgttgttttttcttcttcttcaatcaagcctcttttaccttcagattttcttcaatgcagtcagtgctggcaacttgccgtttattatggtcccttctgaaggtgttccatccttcttgtccacagcatcacagcagtgaagtgtcagacaagcctaagagacacctggaccctgggttgatttctgagctatttttaatcccttcatttactttaaaatttttctaacctactgtgctctggtgcctttgaaacatgggagtcagtaaatggatgaatatcaaaactgttgctttgtctttgaaataagcacattattagaataagaaattgaattagaaatcacaacaaattacaaattcgaatgacaaatatcacaagcatcaaaaaaatctagaaaataagtgtttttaccaattaaaagttaacagatccatcctaaaatattttgttcctacattgtgggggccacagggtctttaatcacctcctcataaagtgatggtttttaaatactctgtgaagagatagtagaaagataatttggatactgccctaatacagttaatgtatgattatttttcattaaaacaaacataaagtgcaaaacccttttctgtgacagtgtagcttttttaaagattcctaaatttgctatcccattccatgttttagacagttcatctacacttcgttagcttttgttcagaatgaaagatgacatatttttgcaccttgtacagacagtcccatgtcttgacagaaaacaaaatgaaaatacccacatatgttgtactgctcatgatttgctgtgaagagagcaggaaaaatgttggaattatttctttcctactcaccctaaaggtggcatattagtaaggctatttcaggagatacaacttaggttatgcattcaagaataaaatattttaaatttgtattaaatgccttatatgtgtcaggcacttgacaaggtgctttacgtatgttgtaatttatttctcataataaccttgcaaagtcagtggtattatccccattttgtgggtgagagaactgaggtttcaagaggtaaagtaacttgctacatagctcataaatgatgactctgagattttagctccaggtttgtctgtttgacctcaaagcccaattcattccctcatacagagatacctcccatagataggattcctttctctccttcttcccttcactccttcctttcttactttttccttccttttttccttgacctcagattttctctcatttatgaggataaaggagttgaaaataaaaccatcataactattgtgtttggaagataccttaaatcttttttagaatgagaaatataggtggaaatacaggtttttgcaaagtttaaagtttattcaatttgggagactttgtttaagaaaaagaatataaaatctgtatcaggtttctcgacatggtgcggtggctcacgcctgtattcccaacactttgagaggctgaggtgggtggatcagttgaggtcaggagttcaaaaccagcctgacaacatggtgaaaccctgtctctactaaaaatacaaaaattagccaggcttggtggcatgcacctgtagtcctagttactcgggaggctgaggcaggaggatcacttgaacctgagaggcagaggttgcagtgagccgagatcacgccactgcactccagcctgggtaacagagtgagaccttatctcaaaagtctgtatcagggttctctaggaggtgaggtatttattatgggaatcggctcatgcaattatggaggcagagaaatcccataatctgctgtctataagcttgagaacccagaaagacagcaatgtaatttattcagagtcagaaggcgtaagaactgggagcactaatgtctgaaggcaggagaagatcaatgttccagttcagagaaagcaaattcacccttcctctgccttttggtcctatttgggttctcaatggattggatgaggaacgttcatactgatgagggtgaatcttctttactcagtccactaatgcaaatgctaatctcttcccccaaacaccttacagacacacccagatataatgtgtttttttatttttatttatttatttattttaccagctatctgaccatcccttagcccagtaaaattgagacataaaattaacatcacaaaattgtcaacattaaagtagatacgaagtgaatacttatttagaatggaagaagaaatcacaacaaattacaaatctgagtgacaaataccataggcatcacaaaatctaggaaataagtgtttttaccaattaaaaattaatgaatacaccctaaatgttttgttcctacaatgtgggggccacaggatctttaatgacctcctaacacaatgatgatttattttgattttgattttttaattaaaaaaattttttttgagatggagtttcgctctgtcgcccaggctgaagtgcagtggcgccatcttggctcactgcaagctccacctcctgggttcatgtcattctcctgcctcagcctcccgagtagctgggactacaggcgcctgccaccatgcctggctaattttttttttttttttgtatttttagtagagacggagtttcaccgtgttagccaggatggtctcagtctcctgacctcgtgatccctactccttggcctcccaaagtgctgggattataggcatgagccactgtgcccggcctttatttttatttattatacttacttattcactttatttatttatttatttatttatttatttatttatttatttttagtaagagacagggtttcagcatgttggccagcgtggtcccgaactcctggcttcaggtgacctgcctgcctcggcctcccaaagtgctgaaattatgggtgtgagccaccgcacttggctgattttttaaatattctataaagagataatagaaagataattcagatactcccctgacatagttaattgtttttcattagagtctagaaaagttccatcgcctagcttttggctctgtttctcctttactacccacatacttcaggtgctgagcaccataggacatatttatatgaagatttcagcccagtgatttagtacaggtagtagggatattcctgtatgtcatttctccaccaaaacatttagcaataacttaaccatgcacaggcatgactacaaaccacaattatataatccactaaatccaaatgaaatctaagggtatccccatctcaactttctttgagccagatccaagacatacctatggccacttcagtgctacctgataggagtagaattgtgaaggagggatagccagtaaaaagagtgctctcaagccaattgcagttaaaatatattttgcaaatttttaacgaaacataagattatgagaacaatgctagagtctttctcggggccttaaagagggttctgcaagtgagggaccttgaagcttaagctttgttggcttccaagaaaacccagctctggaggaaaggtgtaaccaaaaaaaatggtattacactataatacacaagagtccatgccatatagcgcttcaaaaaatgatgttatatgagatcctattctgagcagcttcagctcccaaactcattgaatgaagtagaggatgttctattcagtatattttataaataatatgttgaagatatagatgttctggtactgctaaaactcaaaggtctcagactcctctgccaccatttatattcaaaaaagaattatttgcaaagggattctttgcaaatacaaatagatctctatactcctatattagtctaattaatattaaacacaccatttactattcttccaagcagaccagttaacacacacacacacagagaaagactgtgttattgctgtttaagatcacatagtggaaaaactaaaacatcactaaagaaagataaagtctttaagaattcattaagatgtaatcaagcttttgcaaactcatgtgttatttgcaattatagtatagtgatatggtttagctgtgttcacacccaaatctcaattaaactgtatctcctagaattcctaggtgttgtgggagggacccagggggaggtaattgaatcatgggggctggtctttcccatgctattctcattatagtgaataagtctcatgagatctgatgggtttatcaggggtttctgcttttgcttcttcctcattttctcttgctgctgccatgtaagaagtgccttttgccttccgccatgattccaaggtctccctagtcatgtggaaatgtaagtccaattaaacctcttttgcttcccagtctcgggcatatctttatcagcagcatgaaaacagactaatatagtaaattggtaccagtagagtggggtgttgctgaaaagatacccgaaaatgtggaagtgactttggaactgggaaacaggcagaggttggaacagtttggagggttcagaagaagacaggaaaatttgggaaagtttggaacttcctaaagacttgttgaatggctttgtccaaaatgctgatagtgatatggacaataaggtccaggctgagatggtctcagatggagatgaggaacttgttgagaaccggagtgaaggtgactcttgttatgttttagcaaagagagtggcagcattttgcctctgccctagagatttgtggaactttgaacttaagaaagatgatttagggtatctgacagaaaaaatttctaagctgcaaacattcaagaggtgacttcatcactgttaaagacattcagttttataagggaagcagagcataaaagtttggaaaacttgcagcctgactatgtgatagaaaaggaaaacccattttctgggaagaaattcaagttggctgcaggaattttcataagtagcaaggagcctaatgataatccccaagaccatggggaaagtatctccaggccatttcagagaccttcacagcagcccctcccatcacaggcctggaggcctgtggtttcgtgggctgggcccagggtccctgtgctgtgtgcagcctagggacttggtgccctgtgttccagccatggctgaaaggggccaatgtacagctcaggctatggcttcagagggtggaagcccgaagccttggcagcttccacgtgttgttgagcctgtgaatgcactgaagtcaagaattgaggtttgggaacctccacctagatttcagaagatgtatggaaacacctggatgcccaggaaaatgtttgctgcaggggtggggtcctcatggagaacttctgccagagcagtgtggaagggaaatgtggagtcagagcccccatacagagtccctactggggcactgcctagtggagctgtgagaagagggccaccatcctccagaccccagaatggtagatccaccgacagcttgcaccgtgctcctagaaaagccgcagacactcaacgtcagcccatgaaagcagcaaggagggaggctgtaccctgcaaagccacaggggtggagctgcctaagaccatgggcacccaatcttgcatcagcatgacctggatgtgagacctggagtcaaaggagatcattctggagctttaaaaattgactgccctactgaatttttggacttgtatgggcctcgtaacccctttgttttggccaatttcttccatttggaatggccacatttacccaatacctgtacctccattgtatctaggaagtaactagtttgctattgatttacaggctcataggcggaagggacttgcctttctctcaggtgaaactttgaactgtggacttttgggttaatgctgaaatggcttaagactttgggggactgttgggagggcatgattggttttgaaatgttaggagatgatatttggagggcccaggagcagaataatatggtttgacagtgtccccacccaaatttcaacttgacttctatcttccagaattcccatgtgttgtgggatggacccaagtggaggtaattgaatcataggggccagtcttcccggagctattctcatgataatgaataagtctcacaaggtctgatgggtttatcaggggtttctgcttttgcttcttcctcattttctgttgctgccaccatgtaagaagtgcctttcacttcccgccatgtttctgaggcctccccagccatgtggaactgtaagtccaattaaacctcttttttatcccagtcttggggatgtctttcagcagcatcaaaacagactaatatacatagtttctgaaacttgtctgatactctagataaagatcatctttatgttgatttaaaaattttttaactttgtttaatccccataatcatatattgaccttttttgctgaattttgctcattgagaatgtattgaaatgtctacttttttcatatatatcctattcttagctgaaactctagaatcctccttttttgattatatatgcataattatccttaaatgtaagcagtgcttacaattctgttctgtaccattactatattacccaagtttacaacttaactagaccatggcttataagtcatctaaaaataaataaagcaaattatagaagtattttagccttaaataatgaagacatgtttgtttcaagtgattaaatagtgagaattgtgtaaagccatttcactagcgtcaaaaaactccttttgctctgtccccaacataaaatttgtgtgtaatatacttgaaatttttagagcctctgaaatgttatccaacttattttctttaaggataaaattatttgtttgagaaacccagtttcaagaaaatggcattttatccttactttgtgaagcttccctactcctcttctttcatctaactggtgctgctaaagcctgatacacctagtcaaagaagcattgttccaaaggtcctgacctggaataagaaaacaaaaactggcttcatagctaggatgacaactgtagctccattatcactgaattgctaactttgttcttattctctcaaactgtggttttgccaatgtgatactcaattacctaagaggggagaagtatgatttctttatgattttaatactctttcctctcatattttaaaatagctggttttaggccaataagtgtctactcaaagaaattcaaatccttatataatttaagaatgctggaggaggtttaaatattcatgtacggtcatacttccattttattccacttcacttatatatacatagcacttaacaggtaattgtgttttttataaattgaaggtttctggcaaccttgcattgaggaagttcattggcactatttttccaaaatcatgtattcacttcatgtctctgtgtcacattttagtaattcttgcaatgtttcaaactttcccattattattatatctgttatgatgacctgtggtaatttttgatgttactattgtaattgttgtggggtgccctgaatcatgcccgcattagacagaaaacttaatggataaatgtgtgtgctgacttctccactgaccagtgatttccccagctctcttctccttgggccttcctatttcttgggacacaatagtactgaaagtagtccaataataaccctacaatggcctgtaaatgttccagtgaaagaaagagtcatacattcctctctttaaatcaaaaaatagaaatgattgtccctctccctctccctctccctctccctctccctctccctcacggtctccctctgatgccgagccaaagctggatggtactgctgccatctcggctcactgcaacctccctgcctgattctcctgcctcagcctgccgagtgccgccacgcctgactggttttcgtttttttttggtggagacggggtttcgctgtgttggccgggctggtctccagctcctaaccgcgagtgatccgccagcctcggcctcccgaggtgccgggattgcagacggagtctcattcactcagtgctcaatggtgcccaggctggagtgcagtggcgtgatcttggctcgctacaacctccacctcccagccgcctgccttggcctcccaaagagccgagattgcagcctctgcccggccgccaccccgtctgggaagtgaggagcgtctctgcttggccacccatcgtctgggatatgaggagccccctctgcctggctgcccagtctggaaagtgaggagcgtctctgcccggccgccatcccatctaggaagcgaggagcgcctcttccccgccgccatcacatctaggaagtgaggagcgtctctgcccggccgcccatcgtctgagatgtggggagcacctctgccctgccgccctgtctgggatgtgaggagcgtctctgcccggccgctccgtctgagaagtgaggaaaccctctgcctggcaaccgccccgtctgagaagtgaggagcccctccgtccggcaaccaccccgtctgggaagtgaggagcgtctccgcccggcagccaccccgtcccggagggaggtgggggggctcagccccccgcccggccagccgccccggccgggaggtgaggggctcctctgcccggccgcccctactgggaagtgaggacccctctgcccggccagccgccccatccgggagggaggtgggggggtcagccccccgcccggccagctgccctgtccgggaggtgaggggctcctctgcctggccgcccctactgggaagtgaggagcccctctgcccggccagtcgccccgtccaggagggaggtgggggggtcagcccccggcctggccagccgcccagtccgggagggaggtggggggtcagccccccgcctggccagccgccccgtccgggaggtgaggggcgcctctgcccggccgcccctactgggaagtgaggagcccctctgcccggccagccgccccgcccgggagggaggtggggggtcagccccccgcctggccagccgccccgtccgggaggtgaggggcgcctctgcccggccgcccctactgggaagtgaggacccctctgcccggccagccgccccgtccgggagggaggtggggggggacagccccccgcccggccagccgccctatccaggaggtgaggggcgcctctgcccggccgcccctactgggaagtgaggagcccctctgcctggccagccgccccgtccgggagagtggtgggggggtcagccccccgcccggccagccgccccatccgggaggtgaggggcgcttctgccccgccgcccctactgggaagtgaggagcccctctgcccggccaccaccccgtctgggaggtgtgcccagcggctcattggggatgggccatgatgacaatggcggttttgtggaatagaaaggcgggaagggtggggaaaaaattgagaaatcgcatggttgccgggtctgtatggatagaagtagacatgggagacttttcattttgttctgtactaagaaaaattcttctgccttgggatcctgttgatctgtgaccttatccccaaccctgtgctctctgaaacatgtgctgtgtccactcagggttaaatggattaagggcggtgcaagatgtgctttgttaaacagatgcttgaaggcagcatgctcgttaagagtcatcaccactccctaatcttaagtacccagggacacaaacactgcggaaggccgcagggtcctctgcctaggaaaatcagagacctttgttcacttgtttatctgctgaccttccctccactattgtcctatgaccctgccaaatccccctctgcgagaaacacccaagaatgatcaataaaaaataaaaaaaaaaaaaaaaaaaaaaaaaaaaaagaaatgattaagcttaatgaggaagcatgttgaaagctgaggtaggctgaaagctaggcctcatgcatcagttagccaagttgtcaatacaaaggaaaattcttgaaggaaattaaaagtgctactccagtgaacacacaaatgataagaaagctaaacagtatttttgctaatgtgcaggaagtttgagcggtctggatacaagaccaaaccaggcataccattcctttaggccaaagtctaattcagagtaagtctctaactctcttgaattctgtgaaggttgagagaggagggttagctgcagaagaaaagtttgaatatagcagaggttggttcttgaggtttaaggaaagaagcaatctccataacataaaagtacaaggtgaagcagcaaggagtgatggagaagtggcagcaagtaatccagaagacctagctaagatcattgatgaaggtggctatactaaataatagattttcaatgtggataaaaagccacaggctgactttcttgtttggaaccagtacagctgttgactttaagttgaagccaatgatgatttatcattctgaaaattctaggtccctaaagaatgatgctaaatctactttgcttgtgctctatcaatggaacaacagagcctgtaggacagcagatccatttatagcatggcttactgaatattttaagcccactgttgagacctcaaaaaaaaaaatagattcctttcaaaatattactgctcttcacagtgcagctagtcacccaagagctctgacatgaggtaaaaggagaataatgttttcatgtctgctgtctgttctgcagtccatggatcaaggaagaattttaactttcaagtcttattatttaagaaacacatttcataaggctatagctaccatagatagtgattcctctgatggatctgggcaaagtaaactgaaaactttccagagaggattcaccattctaggtgtcactaaaaacatttgtgattcatgaaaggaggacaaagtgtcaacattaacaggagtttagaagaagttgattccaaccctcatggatgactttgagggattcaagacttcagtggaggaagtaagtacagatgtggtagaaagggcaagataactagaagtggatcctgaagatgttactgaattgctgcaatttcatgataaacgttgaacagatgaggaattgcttcctcataagaaaacacagaaaatgttttcttatgatagaacctattgctgggtagatatgctgtgaacattgttgaaatgatgacaaaggatttagagtattttataaactgaggtgataaagcagtggcagggtttgagaggactgactccaattttgaaagaggttctactatgctactaaacagcatcagacaatacagagaaatcatttgtgcaaggaagagtcaattgatgcaccaaactttattattgttttattttaggaaattgccaccgccacttcaactttcagcaaccaccgccctgatcagtcaatagccattaacgtcaaggcgagatcccctaccagccaaaatattatgactcattgatggttcagatgatcattaacattctttagcaataaagtattttttaactaaggtatatacatttttttagacttgctattgaatacttaatagactacaatacagtgtaaacataaattttgtatgcactgggaaaccaaaaaatttgtgtgactttctgtattgtgatatttgctttattgtggtggtctcaaaccaagctcacaatatctctgagttatccctgtacattcttattcactcttagaattgagtactattggcatgatcaaaatatttttagatgaaagcttaatgcttcttgtaaacagtgctgaaactttagcatgcattggaatcacctaaaggactaattaaaacagaatgctgggccccacctccagagtttctaatacagtaggactgaggtggggcccaagagtctgcatttctaaaaaaattccaggtgggagggaccacactttcagaaccactgttgcagatcatttgatgatgtatatttccaaaatcaaagctgacagggcttgtcatacctactcaagaatagcatgtatgctgcttagaagatggtaagtcattgtcaaagccagagggatactaatgatgacttagagtttcacaggttcttaattgaccattttcattcaccttggctgatgcctagtgttacttaatgcttagtaagaaatctttaggccaggggcggtggctcacccctataatcccaaactttgggaggcagaggccggcggatcagctgaagtaaggagttccagaccagcctggccaatgtggtgaaaccccatctctattaaaaagtacaaaaattagccaggcgtgctggcgcgtgcctataacccctgttactctggaggctggggctggagaattgcttgaacctgggaggcagaggttgcagtgagcggagatcatgccactgcattccagcctgggcaacaggagtgaaactctgtctcaaaaaaaaaaaaaaaaaaaatctttaagcaatgtcttggccctaagaatataatctaaaatatgttcttatgtttatatcatcttcgatagctgattaaagtgatgtagcaactgagaatttcaattgttgatttaaatcatggaatatacaaaaagatataatccttgttaggtcctgcatactttctaaagccattatgaggtcttaattaaaagaaacaaagaataaaaccctcattttttccctagcccttactctgcttattgtttaaacataattataaagactctgaataacaaaaatttaactggaaagatgaaatcagtattcttaatactacttagtggcttttaggtttaggacatatgtttaatatgtattctgttgatttttcaatagatcatgttaattaacatgtctcaattacctattgaataatgtctctaaaatgcctatctgtgattattattcatgagattacactcccattttaccagtactatgcctatctgtgattattattcatgagactacactcccatttgaggagtacttttcttttcttttttttttttttaaagatggggtcttactctgtcacccaagctggagtgcagtggcacgaaatcggctcactgcaacctccgcctcctgggttcaagcgattctcctgccttagcctcccgagtagctgtgattacgggcacctaccaccacacctggctaatttttgtatatttagtagagacggagtttcaccattttggccaggctagtcttgaactcctgaccttgtgatctacctgcctcggcctcccaaagtgctgggattacaggtgtgagccactgcgcccagcttgagcagtacttttcaactctgagaagataaacccaagggattctagaagagggtctgcttggagaataatttctccagtaatggtatctgaaggttgaataaaaacaagtgaatagatgtagatattgactaagagtgactaagaaagacagttaccttattaattaatacaatcttgagtgtcatcaaattagctatggggcatatatcctacactcagaaattaggcactattaaagttaaagggggccacactgaattgaaagaggcaagaatttaacaaacaaaatgataaactacaaaaggtaactaaataaacagagcagcttcttatatattctccaataaggcattgtggaaacattgagggatggagggatacccaagccaagatgggtattagactgctaactttgacattaaacactgagaaattcttgagcagggagcttcctttgtatgagtctcatcttcatcacctttaagaagcaattaatgaaatctagtctgcttacttcgcaatgttttgagcattaaatttaattatatacaaatatgtacttttggtgtctgttcagtgagaattgattctcacttccctaaaagtaatttaaacgttttaatcaaatgtgtaatgttgacatctttacctttccaagtacttttgtacttttccagggttaaaataacatttttgtcatttaaatgaggaaaaaatataagttttttaaaaactcaaatgtcatagctttttaactgttctaattgtgtctgctaatagaaacaagttgatgtgcaaaccacaaaataataaatatttttgcctagcttttgggaaaaagaaaagactatagtatactttaagtaagtgtaaatttagtttcattttagcaattccatagtcgaatctgtcactaagtaatcattagttaaagaaaaaaaatctagccaggcaccgtggctcacccctgtaatcccagcactttgaaaggctgaggtgggcagatcacaaggtcaggagttctagaccagcctgaccaacatggtgaaaccccgtctctactaaaaatacaaaaattagcccggcatggtggcgggtgcctgtaatcccagctactcagaaggctgaggcaggagaatcgcttgaacccaggaggcagaggttgcagtgagctgagattacaccactgcactcctgcctgggtgacagaacgagactctgtctcaaaaaaaaaaaagaaaaaaagaaaaagaaaagataagaaaaaaatctagtgcccagggcatgcaactatataagtaaaaattctaaaagatcatcaatgtttaagaataaaatacagtcagttatataattttaaaatatttctaatgagtgataaggaaaacttgtcaatggaatttctgaagtcaatagccaatttttaactttatctgctaatatggcaattatttaacttaaaaaacagacacacttcttattcagtttttggacatcttattctgtaacttcctattgattaacatcgcctttaacattttaagtacttgtcgtaacattttatcatttgaataattcatattgtattatactcttcacttttataggaacaatcatcaaccaacattttaacctattaatctaaactaaattttttcctctcatttaatctatcaattaagattcttctgattgtatgtaacagaaaatgtagttcatttattatctcacattagaggaagtctagtggtagggcaggccccagagttggtttatttgttagcttaattatgtattaaaggacttggcttcttcgagtcactactttgccattcttagtattgtcttttctcaggggaagggtagaaggagggataaaaaggtggctgctgtacttccaagcattcagaatcattgaaaagtcttgctaaatcagactgctgcatctaatccccagaatttgattcagtaggactcgccggagtgtgagaatttgcatttctaataaattcccaggtgatgctgatgctgctcatagtaaagccacactgagaaatattaacttagactaatgatcttggaaacgaatggattttttcttttctttttagttcacatgtaatagttgtatttatttatgcaacacagaatgatattttgatacatctgtactatgtgtaatcatcaagtaagggcaattagcatatccctcacctcaaaaatttatgatttctttttgttgggaacattccaaatcctctcttccagttttttaaaaatatgcagtaaattgttgttaactatactcatcccacagtgctataaaacactgtaatgtatttctcctatctagctgtaattttgtatccattaaccaacctctccctattcctcccctccaactacatttaccagcctctagtaaccactattctactatttacttctatgagttcaacttttgagctcatgtatgggtgtgaacatgtgttatttatctttttgtgccttatttatttcacttaacataacatcctccaggttcatccatgttgccatgaatgacaggacttaattcttatttataactgaatcgttttctattgtgtatatataccacattttctctatccagtcatctgttgatggacttgtagtttgattccattatcttggctattgtggataatgctacaataaacatgggggtgtagatacctcttcaatatactgatttgcttttctttggataggtacccggtagtgctgaatcacatgatagttctatttttagttttttgaggaacctccatactgttttccataacggctgtacaaatttacaatcacactaatactgtatgagtttcccttcttctgtatcctcactggcatttgttagtttttgtctttttgacaatagtcattctaacaagtgtgaggtgatatctcatcgtggttttgatttgcatttctctgatgattagtgatgtcgagtgttttttttttttatgtacttgttggccatttgctttgagaagtgtctttagatcatttgcccatttttaaatcaaaatatttgagttttttttggagttattttttgagctgttggtttttttcagttccttgtatatcctggatattttgtcaggtaaatagtttgcaaatatttatttccattctacaggttgtctcttcattttgttgatgatactctttgttgtgcagaggcttttagtttgatatagtaccacttgtctatttttatttttgttccctgtactcttgaagtcttacccataaaattttttcctagaccaatgtccagaagcattttccctgttttcttctagtagttttagggctttgtgtcttacatttaattatttaatccatattgggttcatttttatatatgctgagagttaggggtctaatttaattcttctttaatatgaatatccagttttcccaacaccatttattgaaaaggatgttctttcactagtgtatgttcttgtcttcttttctgaaaattagttggctgtaaatagttggattcatttctaggtcctctattctgttctatttgtccttgtttctgtttttatcttgctgttttggtcactaaaattttgtagtgtattttgaagccagatacagtgatgcatccaggtttgttctttttgcttaggattgctttggttcctcaggatcttttgtgtttccacatgaattttaagactgttttttctatttctatgaagaatgtcgttggtattttaattggaaatgcattgaatctgtagcttgagtaatatggtcattttaacaatactaattctttcaattcatgagcataggatgtctttccattgtttttgtgtcctctactatttgtttcatcagcattttatagttttcattgtagaggtctttcacctccttggttaaatttattactaggggttttttgtagctagtataaatggaattgctttcttgatttctttttattgttgttgttattggcatacagaaatgctactgatttttgtatgttgattttgtttcctacaagtttactgaatttgtttattcgttctaaaagtactttggtggagtatttaggtttttctgtatataagatcatgttatctgcaaacagggacaatttgacttcctgtttttgaatttggatgctgtttatttatttctcttgcctaatctattttgtctgatataagtatagctactcctatatacttttggttttcatttgtgtggaatacatttttccattccttcactcacagtctttgtctgtttttaaaggtgacaagagtttcttgtaggcagcataaagttgggttttgtttttgcttattcattcagccagtctttatctttcaattggggggatttaaaatgtttaaaagaaactaccatcagagtgaacaggcaacctacagaatgggagaaaatttttacaatctacccatctgacaaagggctaatatccagaatctaccaaggacttaaacaaatttacaagaaaaaatcaaacaaccccatcaaagagtgggcaaaggatatgaacagacacttctcaaaagaagacatttatgcagccgacagacccatgaaaaaatgctcatcatcactggacatcagagaaatgcaaatcaaaaccacaatgagataccatctcacaccagttagaacgggatcattaaaaagttaggaaacaacaggtgctggagaggatgtggagaaacaggaacacttttacactgttggtgggactgtaaactagttcaaccattgtggaagtcagtgtggcgattcctcagggatctagaactagaaatatcatttgacctagccatcccattactgggtatatatccaaaggattataaatcatgctgctgtaaagacacatgcacgtgtatgtttattgcggcactattcacaatagcaaagacttggaaccaacccaaatgtccaacagtgatagactggattaagaaaatgtggcacatatacaccatggaatattatgtagccataaaaaaggatgagctcatgtcctttgtagggacatggatgaagctggacaccatcattctgagcaaactatcacaaggacacaaaaccaaacactgcatgttctcactcatgggtgggaattgaacaatgagaacacttggacacagagtggggaacatcacacactggggcctgtcgtggggtggggggaggggggagggatagcattaggagatatacttaatgtaaatgacgagttaatgggtgcagcacaccaagatggcacatgtatacatatgtaacaaacctgcaggttttgcacatgtaccctagaacttaaagtataataaaaaaatcataaaatgtttagccctaaggttgctattaataaatgagaatttacttctgtcattttgttaattgttttcggaatgttttgtgtaccctttgtttctttttgtttttctttgcagtttaatgattttctgtagtgataatgtttagttcctttttctgtcttatttttgtatctgttctaccagtgaattttacactattgtgtgttttcttgatggtaaatatgacattgtcctttagcttccaaatgtgggactttcttaagcattttttggaggggtattgatgagtttcctgtttttggtttctggaaaatactttatttctccttcatttctgaaagttagctttgctgggtatagtattcttgcctgacaatttctttctttcagcactttgaatatattatcccattctctcctggcctataaggtttctgctgagaaatatgctattattctgatggggattcctttagatatgacttgatgcttatctcttgctgttttcagaattctttcttcaacttttggcaatgtaactataatgcatttcaaatagaacctttttgtgttgaatttatttggagatctttgagcttccagtatctggatgtctatatcactcctaaaatttgggaatttttcagctattattttattaaattacatttctttctgttgggaccattcaacatacactttctagctatttgaaactatataagtattgtttatttcatacattgggttcttcagttttaatatatatatattttttgacagagtctcactctgttgcccaggctggatgcaatggcacaatcttggcttactgctacctctgcctcctgggtcccagttcaagcaattctccttcctcagcctcctgagtagctgggattacaggcacatgccaccatgcacagctaatttttgtatttttattttttaatagaggcagcgtttctccatgttggccaggctagtcttgaactcctgacctcgtgatccacctgcctcagcctcccaaagtgctgggattacaggtgtgaatcaccatgcctggctgatatttctgtttttttctctttttttaatgaaatgtacctctgttgaatttttcattcagatcctgaattgttttcttgattttattgtattgtttatctgtatttgtttgcatttcactgagttttctgaagataattattttgaatttcttttcaagcatttcatgcatttccttttttggtattctgctactgaagaattaccgttgttttttggtgctgttatatttccttgctttttcatgttattttgtttctctatgttaatatctgtgcatctggtgtaaccgttgttttcttccaattttatacagtatctttcatagaaaaagactttttcctatagatgtattcataatgtaagttgggtagagtgctttggctttcattctgggtgggtgcgatagtacagtctctgtataatttctttggctgtcatcaacatcagtggtgtctgcaagttcctcagtggcttagattgcagttgtctgtgggaaagctgtgctggatggggatgccaggtgagatgatccttgggcccctgggcagcacatgggtgcatgatgacctcatcgctggaatgggctgggttgctggcagaagtgatagtgaaccctcatgtggtctggtcctttaacccctatttggtgtggtggtggcagcaggtacctaggaggagtgcaaaggtgttcatggtggctgggaatggatgtttgaggattacttatgacattcattaaaagatatactataattatcatttggaaaattacagagttccctttactcacctcaaagggcctggtgtcatttttagtttgtaagcctcctgttaaatattctacactgggacactgctcatttaaaataccaatatttctagtagttgatgtagtagttttgcagaaaatagttttgcattcagatgtttgaattgggagcttgattgggtcagttcaagccccaaattttcacctcagcttacctgttcccactcataggaagttttacccctccaaatcctcatttttccaattcgcctaaatattggacatttagaactattaaaaacttaaaatatgatacaggctacaaaagcattaccttctataatcaaggaagaaaaataaggttgtccaaaggcatactgtaaatgcttctaatccaattttccacctgatctttgattgtagcaataaattttctaagctaaaggattaacaatttgcttgtgttgcaaaaactctttcctgccaatttgtaattacccttctctatcatttatctcataaactatattgccaaattgtaatttcccctttttcattatctatttcaaaaaccatctcattgatatgggttctgtatctcccatagtatgctcagtgggactagtggtctgtttggatgattgtcctgggctaaactgcaggatcctcataaagccttggggctgtttatctcactctccaatttattatcataatggcattttgtgcctttttcctcatttatttgcacaataggaagcacagtggagagagatgatttctgcagggggcctggaaggacaggggacaagttcagacacagaagaaagctttgcagaaaatatctgacttccagcagttactgggatagaaaacttttaagtgcaaaatgtactattttggaggtatgaggaaatgctacctttcccaaagcactcccacatcccagtgtgcagcaggataaagagagactgaaaatgtttctgatatgaaattgatacagcatttaaatggagggaggaggcctaggctattaatgcaaacacagctagaggcctgcagatatgacacagaatttttcccacagttttaatttaaaacaaccaacccgtcagcaaagctttcaaagttggtggaagatattggccagtggcaatttaacttactcacctattttaagacctccttttctttttcttcttcttcttctcctcctcctcctcctccccctcccccttcccctcctttgtctctctctcatccaggctggagcgcagtggtgtgaacatggctcaccacagccttgtcctcctgggctcaagcagtcctcccacctcagcctcccaagttgctgggaccacaggtgcacaccaccatgcccagctagtttttaagttttttgtagagatgacgtttctccatgttttccatgttattacttctatttctttgaggaaagtcattggcattttggtagagattgcattcaatcagtagattgctttgggtagcatggacatttaaaaatattaattcttgcattccatgaatatagaatatgtttacattgttttgcatcctcttcaattgctttcatcagtgttttacagttttcatcatagagatgtttcacttctttggttaagttaatttctagggatttaattttatttgtggctattacatgtgggattatttttacctctttttcatattgtactctgttggcatatagaaatgctactgatttttgtatgttgattttgtgtcctgcaactttattgactttatttaccagttctaatagtttttggtggagtctttaggtttttccaatatatagtcatatcatctgcaaataaaaataatgaaacttcttcttttacaatttagatgttaaagaacatttctcttgcctaattgctctagttaggacttccagtactatgttgaataatagtggtgaaaaagtgggcatccttttcatgttccagtcttaaaataatgactctaagtttttccccattcagggtaatactagctgtgtgtctgtcatatacttttttctttcttctttttttttttttctcactctgttgcccaggctggaatgcagtggcgcgaccttggatcactacaacctccacctcctgggttgaagtgattctcttgcctcttgtaatcccaagtaactgggattacaggcatgcaccaccacacctggctaattttttatatttttagtagagatgaggtttcaccatgttggccaggctgatctcaaactcctgacctcaagtgatctgcttgtcttggcatcccaaagtgctgggattacagacgtgagccaccatgcccagcacaacttttattatgttgagatatgttccttctctacctagtttttaaagggttttaatcatgaacagatgttaaattttatcaagtggtttttcagcatcaattgaagtgatcatatggtttttgtccttcattctgttgctatgacatatcacattaattgatttgcatgtgttgaaccatccttgcatcccaaggataagctcacttggtcatgatgaatgatgtctttaatgtattgttgaatttggtttgctagtatttcattgaggatttttgcattaatatttatcagagacaccagcctgtagatttttttttgatgtgtctttgttctttgtatcagggtaacacttgcctcgtagaatgagtttggaagtattccctcctcctctattttttgtaatagtttgagtagcattggtattagttcacctttaaatgtttggtagaattcagcagtgaagccatcaggtcccaagcttttctttgctggaagactttttattatggcttcaatcttgttacttgttactgttcaggctttggatttcttcatggttcaatcttggtaggttgttatgtgtctaggaatttacccatttcttctaaattttccaatttattagcatatggttgatgatactagccactaatgatcctttgaatttctgtagtatcagttgcaatgtttctattttcatctctgattttatttatttgggtcttttccttttttttctttgttagtctggctaatggtttgtcagttttgttcatcttttcaaaagactaactttttgtttcattgacatttttattgttttcttcatttcaaacttatttctgctctgatctttattacttcttttttcctactaattttgagtttgatgtgctattgcttttctaatttttttaaagatgtatcattaggatatttatttgaagtctttcttctccttcttttttttttttctccacagagttttgctctgtcacctaggctggagtgcagcctagctcactgcaacatctgcctcccaggctcatgcaattcttctgcctcagcctcccaaatagctgggattgtaggcacctgccacgacgcccagctaacttttgtctctttagtagagacagggtttcgccatgttgtccaggctggtctcaaactcctgacctaacctcaagtgatctgcccaccctggcctcccaaagtgccgggatcactcatgtgagctgccgcacccaaccctctttcttctttctgatgtaggtacttagagcttaaacttccctcttagtagttatagctataaacttccctctttcaatgtatctgatatgttttggtatgttgtgtttccattagcatttgtttcaagaaatttttcaatttctttcttaatttcttttctttctttctttctttttcttttcttcttttttttttttttttgatagagtctttctctgtcacccaggctggactgcagtggtgtcatctcatctcactgcaacctccgcctctcgggttcaagtaattctcccacctcagcctcccgagtagctggattacaggctctggccaccatgcctggctaatttttgtacttttagtagagagggggtttcacgacattggccaggctggtctccaactcctgacctcaggtgatctgcccacctcggcctcccaaagtgctgagattacaggcgtgagccactgtgcccgttctccttcttaatttcttcattgacccactggtcattcaggagcatattgttgaatttccacgtatctgtatagttttcaaaattcctcgttattaatttctagttttattccattgtggtcagagaagatgcttgatattatttcatttttggggaacgtttaagacttcttttgtgacctaacatatggtctgtccctgagactactccatgtgttgagtagaagaatgtgtaatctgcagccattggatgaaatgttctgtaaatatctattaggtccacttggtctacagtgcagattaaatttgatgtttgttgattttctgtctaggaggtctgtccaatgctgaaaatggagtgtttaagtccccagctattttgtattgaggtctatctctctctttagctctaataaaattagctttatatatctgggtgctccagtgttaggtacatacatatttataattgttatatcctcttgctgaattgacctctttatcattatatgatgaccttctttgtctcttcttatagtttttgtcaagaaaactattttgtctgatataagcatagctactcctgctcttttttggcttccattggcttggaatatctttttccatccttttattttcagcctatgtgtatcttaataggtgaagtgtgtttcttttctttcttttctttcttttttttttttttttttttaagacggagtcttgctcttgtcgcccaggctggagtacaatggcgcgattttggctcattgcaacctccgcctcctgggttcaagcgattctcctgcctcagcctctggagtagctgggattacaggcacctgcgacaacgcccagctaatttttgtatttttagtagagacggggtttcaccatgttggccaggctggtctcaaacttctgacctcaggtgatccacccgcctctgcctcccaaagtgctgggattacaggcaggagccaccacgcacagccggtgaagtgtgtttcttataggtgatagatcactgggtcttgttttttaatctattcagccactctgtgtcttttggttggacagtttagtccatttgcacttaatgttattattgataagtagagactttctcttactattttgttatgtgttttctagttgttttgtggtcttctcttccttctttccttccttctgtcttcctcttagtgaaggtgattttctctggtggtatgatttaatttcttgcttcttatagttttcgtgtctattgtacgtttttcaagatgaggcttgcaaatactatcttataacccattattttaaacttaagacaacttaaaactgattgcataaacaaaaacacattaaaaaaaagaaaactaatagaaactctacactttaactttgtccccctgctttttaacgtcttgtttctctttgtttcattgtactatgtcttgaaaagttgtcgttatcatttttggttggttcaccatttagactttctacttgagtactctacatgccacaattacagtttgtttttgcaatcagttataatattctctgattttctatgtgcttactattaccagcgagtttgtacatatatatgtattttaatttttatattagatttgggggtacacgtgaaggtttgttacatagataaacacgtcatgagggtttgttgtaaatattcatatagatgatttcttattgctcattaacatctttgtctttcaggttgaagaactctgtttaacatttattttaggacaaatctagcattgatgaaatccctcagcttttgtttgtctgggaaggtctttgttcttcatgcttgaaggatattttcaccagatatactattctacaataaattttatttttttcctttagcactttaaatatgtcacaccactctctcggcctgtaagattgccactgaaaagtctgctgccagacatttgggagctccattttattttatttgtttcctttctcttgctgcttttaggatcctttctttacccttgacttttgggagtctgatatattaaataccttgggggtagtctttgggttaaatctgcttggtgttctacagtcttttagtacttgagtgttgatatctttctccaggcttaggaagttttctggtatcatccctttgaataaactttccatccccatctttttctctacgtcctctttaaagccaataatttaagagttattgcccttttaaggctattttctagatcttatagccatgcttcattcttttttatccttatttcttttgtcttctctgaccatgtattttcaaatagcctttctacatgttcactatttattttttctgcttgatcaattctgctattaagagactctgatgcattctttagtattccagttgcatttttcaactctagaagttttgcttctttttaactatttcaatttgtttgttaaatttatctgataaaattctgaatttcttttctgttatcttgaatttctttgagttttctaaaaagagctattttgaattctctgtctgaaaggtcacatatctctgtttctcctggattgatccctggtgtcttatttagttcatttagtgaggtcatgttttcctggatggtcttgatgtttattggtgtctaagcattgaaatgttaggtatttattgtagtcttcacagtctggacttgtttgtgcccatcctccttgggaaggtttttcaggtatttgaaagaactagggtattgtggtctaagccatagctgcgtgagggggcacctcaagcctagtaaggttgtggttcttgtagacttgtagaggtactgccttggtggtcttggataaaaccctgaagaattctctgtattatgaggcagagactcttgttctttacccttactttttcccaaacaaatgaagtctctctgtgctgagctgcctagggctgcaggtagagtgacatactacccccctggccctcactactgggactgtgctgggtcagacctgaagccagcacagcactaggtcttgcccatggctttctgtaaccactacctgggtaccacccatgttcactcaagtccctagggctctaccattagcaggtggtgaagccagccaggttggtgtctttcccttcagggcagtgagttccccacagccccgggtgggtccagagatggtgtatgggagctagggactgcagtcaaaaatccttgtatgtctacctgacgttttattctactgtagctaagctggcacttaaaccacaatacaaagtccttcctgctcttccctcccctttccacaggcagaggagcctctccctgtggcaaccactatcactgggccatgggtggttttctacaccaccattggtattcacttaaagttcaaaggatcttcagtcagcttgtggtgaatgctgccaggcttggacatacccttcagggcactgggcttccctctggcccagggaaggtcatgaaatgccatccaagaggttaggcctgggattggggacttcacgagcccacttgttggtctaacccactctgactgagctggtatctaaagtgcaaaactaagtcctctttactttcccctctgcttttctctagcaagaggagtctctcaccatagccaccacagctggcaatgttctgggtctcacttgaagacacgtctcagagtctcacccaaggcccatgccatgatgcactacctgggtattgcggctgattatttagtacccaaaggctctttattcacaggtgatgaatcctgccaggtgtggatccttcccttcgaggcagcggtttaccttttggcccatggtgtgtctagacgtgtcatctatgagttagggtctagcatgggggcctcatgactgcccagtgccatatcctactgtgactgagctggtatgcaagatgcaaaacaaagtcttctttgctctcctcttcatacgcagaggagtcacttttgttgcttcaagctgtgctgcctggggttgggggaaggatggcacaagcactcccttagattccctggctagtgtctccccaggtcatgtaccaccctagtccagtggctctaagcccatcccagcccagcactagaagttgcctaagaactgcaatccctgtgtcctagacagactttcaagtttacctagaaccccagagcactttggcctatggtggtgaggcttgccaaaaaactcaagttctgacaattgggatggtccattcccctctggctaggtctggtccaaatgttcccttcatgcatgagtgctggctgagcccagcatggctttgctctccactgtgacatggcagcactgagttcaatagaaagaccactagccactgcactctccctcccccaagtgcatatactctctgtgtagcagggctgctgctaggttatggggaaggggtggtgtctgtgattcaagactgtctctcctactctcttcaatgattctttcagtgatatgaatataaaaccaggtactccgattgctctgatttttggttcttgtgatggtatgcagttagttgttaaactttccagtatgcagatatttgttaaaatgtgttgttcctgtcgggggttatcaatggtacaggcttctattccgccatcttgctctgctctccaaaacacttcgaatattaaacactgaaataaatgtgagttatacatacatttaagaaagattaataaaacaaataaggtaattatttacccaattattccagttccgggttgtaggtggctggagcctatccagcggctcagcactcaagggaggaatcaaccctggacaggatgccattctattgcagggtacacatgtacacacactcactcacactgggacaatttagacacgccaattaacctaacatgcacaactttgggatatgagaggaaaccagaatacctggagaaaacccatgtagacacagggagaatgtgcaaactcaatacagtggccctaccagtaattgatgtttttttctcatcatttaatgaaatgatgttgaacaaaatgaccttattcgaggacctagtgtacaatgctttttgtcaggcattaatattcatgccatcaaaatcaaaagcacaggctcagctaaaatttctcaaatgcatggaaacaagcacctcaacactgttatcttttaatttcaaatggttacctgggctcaaaatctgggtgtgcaattttatctgctctgggcagtgctcaatatcgagcatttcttacaacaattaggacttattcccattcagataatgttgtcctagttaacccctttgtggtttttggagatgtaggtttattctttaaactttttttttttttttttttttttttgagacagtttcttgctctgtcccccaggctggagtgcagtggcatgattacagctcactgcagctttgacctcctgggcttaagcaatcttcccaccccagctgcctgagtatcagggaccacaggtgtgtgccactgcacccagctaatgcttttattttctgtaaagacaggatctcactatgtggtcaagcctggtcttgaactcctgggctcacacaattttcctgcctcagcctcccaaaatgttgggattacaggtgtgagatgcaccagaaacccttaaacttcttaaaaatcccttaagtcctcttggttttacaggaaagtaggagcttggattttagtttgatcataggaaacaagtagattgttattcattcaacaaaaaatatttatgataaacatttttcaggctatccatttatttaataggtctttattacatatttactgctgtcaaatgttttggggccagaggtgaattatgctagtttggaaactaggtggaatattatcatttaaatggatacctttgtatctcaaaacaaatcctgtagtttatataatttggaatattgtatgtctgttttccatggaaatgatgaagttcattggtcatggtactcttgggtcatgggactcacactcactttgctcttacctctttcttattttcacatgcatcccatcgacactcatgtctaatccagaagactggtagtatataagatcccaaatattaccactggctcagaatctgagccaatgaatggagagactatgtcatacttgaaataaacttctttaacaataaaaattaagagtataagttctctcatttcatctcagtttcatcaaatatttcatgtttaaaatgctagcaagtgtgaaagaggctatggaattttgtgagtgataaaatatttgtagagtacttggggatctggatctgggtgctattaaaaccaaccaaacacaagtagctcatatgagtccttcaatttttattcttgcttccaacttttaatcttccagcactgccaaaacatggaactaggcagatttatagcaattctggtagatgtttgttaggaactgatttcgtacaacactcttggcaataaaactatagttttctaaacttgacatttagcatgtcctttatcttataagaagaaaaatacttctgttgttctgttggagtaggttagcttataaaaataaagtgatgcatctttatatgtttttaacgtgtccaactttgccaggcatggtggttcatgcctctaatcccaagcacattggtaggccgaggcaagaggatctcttgagcctaggagttcaagactgcagtgtgctatgatggcatcattgcactccagcctcagcgacagagactctgtctcttaagttagtaagtaaataaataaaatgttcaacttaaaataaaattacaatttcttttctagcagctaggtgaaatttcttaactattaacctctggtactttaaacaacattaaaacagcctttaaaagaagacattaattaattgaggaaagattttaaaataattttttccaagttttaatttttaaatccctaaagaaccacatattcttgtaccatccaggtttataaaaatgcagctatcaaatttgatattaaaaacaagataccgcacaccctttgtggaataaagcacagtataaagaaaattagaatgtcatgaccattcttcttcaatctttcccatttgtaatatttcccccaagcggaaaagcctgacaaatttccctttcttgcacgtgaccactttttgcatcagatgcatttaattttgtaggttaaatattcaggacaaaaggagagtagaaagaatttttagagctttgatttctatggaagcaataagctgaaacttggaaataatatgtttcattgccatcaatcccattgtagctagctaacactccagggatttccttgattctctctataataatcttatacttctatagtgcttataatttgcaacctgtgttcacttactttatgagattcttacaaaaatcttttgaaagaaggctagtgtgtatgtatatgtgggtgtatgaatatacatatatatgtgtatatgtttgtctatacatatacatatgtgtgtgtatgacatatatatgtatatagtcatccctcattgtccacaggggatcggttccagaaccccctcagacaccaaaatttccagatgcttaagttttttatataaaatgactaattggtcaattcttcttggtaaagttgatcttgatcttaccagtttcttttttggcttagtaataggaacaatgattttcataatttaggggaccaaaagtaaaatttcagtttaagtcattttaggaataaaccatggagctataaatcttttggaggagttatagattcagtgttaatgctagagtattgcagtatattaatacaacagatagttctgaaaagttgctttagaaaaatgtttcagctaaagtgacccaataccaaattctgtacagttaccctctattttgtaaatgcatatgttaatatcaaagtatttatattgtgtaatttcctaccttaggtgcttttgtttttaatataatgctgtttcaaggtcgaatatgtacagtaataactgttacaaattgattacgagagatcacaatcattgtacaaatcacaggctatgtcattgtgtagacaaaaatcactgaccatgcatgccagaggtggatcataaatagtaactcctaagactagaaatctacttgatatttttatgggttcatctttaaaagtgacctcgctgaataaaagttcaatatttcttaaaagaaaggtaaatctaaaaaccgtccagaattttcgatcctagtctagtaccacttacttgggaacaaatatagaagcacaggcaaccccgtccgttaatttggctccgtcattgtgcagacaaaaatcactgaccatgcatgccagaggtggatcatagttaactcgttaagactagaaatctacttgatagtgatttttatgggttcatctttaaaagtgacctcgctgaataaaagttcaatatttcttaaaagaaaggtaaatctagaaagctgtccagaattttcaatcctagtctagtaccacttacttgggaacaaatatagaaacacaggcaaccccgtccgttaattctgatgttgaacgtgtggttagagagcacactgcgatatgttacaggacctgagataaaaagcaaatttgtaaagtgtctaagtgttgatggagaaaaacacatctagcatatacggaaattttcttttgagttctctgtaggatgatcaccaactcagtaggtgaagccctgccctctagtggttatgggtgtgagaggacttctgttcaacattatatgtctggctcaccacggtttattaaaaccaatcgttcattaaaaagcacttattaggggtctgggtaagatgccgagcaagtgaaatgtttacgtgtgaaaaggcattgacactggacaaaggtacagctgctaaaagaagtgctcgttcattggcttcgacagctgtacgactggtttctaattgctgttccagcctctccccagttccatataccacaaacgaatgaaaaagattagctctccctggagctctctgaggctgaaccttgctctctcattacacatggtaactaagcacaccccttaaagaattttgggaagtcgccccgcgattaccggctcccccaagaaccaagcagtcagtgcagggttttgcaagtgagagtgcgagactcgggaggctgctcacggtgctccagtccctggcaggagcatggacacctcgccccttccttccgtgggcctcaacgttgcctgctgagattgtgactgccaccccgacgggagcagcttcccctacagactttgtagagagcgcttaaacgcctcggggacagcggccatgactctcagcttgggccgaccccgcggccgccccacgggaatgcgtggccgacacggggcgtgggcgaatctccgaccctcgcgttcagggggtgcatataaacgggcggacaccgtccctggggtaagggaggcgccagcaagaacaaggcgggccaccaaccccgagcgacctcctaccggacggatccaaacccaaacattgtccattccgggccgaagtctcggccttcacttcacttccgccttcccagcccgtgaacacgaatgcgcctgcgcgcacctctctcagcggaagtaatagtgacaaagctgggttcgcggctggcccaggagtgcggggcgcgactgggcggccggcggcggggaggggcggagcgcaggagtcggaggcgggagcagaccagcacggcctcgcggagccggcccggcggaccgtgacgggtcccctcacctcctcttctctcccctccccgcccgccctctctccctcccttcctccctcccgctcgcttcttctcacgccgggagcaggctcccgcctcgcaccgctgccccgcgagcagctcctcttctcccgaggcgcgcggggcgcccccgcgagccccgcggctgagaccccgcagcctggaggagggctgtccggggctttgggtgggtaccagtattacctcctgcccccatttctagaaacttccaggttctgaaggaaggggaggttcgggtatcccctggatgggggggcatctctagggcgccgccccgctggcgtgagctggggacgttgcgggcacacgacggggcgggtgcgggatcttggggaggggggctcccgagatagtggctgggcggggaactccttcctcagcctctcgtcagcgccgcttctcctggtttctcttgcagatgctgctgctaggggtggtgggagcagccgtgggacgcgtggccgggagcgggggtgacagcctgggattccgggggcttctcttccttgtcctcctcctctcctctctattcccagtgtggccgtggctgacactaaagactttgtagccatcaacccgagtgcagtttcgatggaaaatgaaggtaaaggcccctggccgaccggttgcaacgcggagttgagggtgtggtggtttgcttttaagttgtctttgtttttccacctttttattttcgtgagcttatttatttactgtgtatgtgaagtgtccaaggatttgcttacttagggtatccagcttttattttggtaacatggggcatttgagagattgaggttctgtgggtgactgagcttgattcagctttcttgaggaattcctgctctcttcagcttagggaatgagagggaagttttcatttcagatagcgtctgtgcatgtttaaatagctatttgaaaggaattactcgaggggaagtggaaatgggggacaaggggatggggctgcatctctgtatattggcgtttcaagcctcgatgtggtgtgtggcaggattcatttataagaaagcaagccatgttttattatgtctagcattggggaaaaaactcattatttttcaattcacaaaaaaaacccagtgaatttaatgaaatgttatgagatgagtgcttttcttaaagttccaccctatttcaaaacatcatttaggaggctgacagcggaacctgtttgttcactgtacactttggacacattagatcgtcattcacatgttacatgatccctttggcctcgttaaaatatttaatgcttttcctacacagcactgattatttttaaaattgttgaacaactgtgaataagtgattttttttccccctcctgaaacaacacttattctttggactgacttctgacttgtgcgtgatcatttttttttcttctgcctttaaccgggctgcaaaatactataaaagatacttaacaaatgacagttttttcctctggtataatttgttttaaaaaatatgtgtctggtataaaggagctgcagtcttgctggctgcttctaatttgtttttccattgttgagaatgtaagcttgattgtctgactaggactagtaattttgaaatgggtgtttcttatagatgcagtaatgtgttttgctctctgagacctctgggctatgtagggaatatgatgagaggcatgattatattgacaaattttactctggatggataattggcggaagacattttctgaaatactaaagtgtataactgcagaggagttatactgtctaattgggtcttgagaaacatttgaaagcagtgatgtttttggtgataaggaaagtcacttttctgagcctttttcctctcttttaagtttattgatttaagaaaggcaaatccattctgcacatgagacaaagaatgttaaatgcattcatatacttgtttcttggtagaaacatcttaaataacttctaacatttaatgtatgtttatgagcttgttttcagaatggtaccagatttaagagggtagcctaaagtaggtggattctttcatgttgcttttgtttcttgatctctcaggaggaagagcatgagtaataaagccgattctcattatctactgaggtgggagggggtggttgtgagataggagaatggtgcctacttgtgtctgtctctgtattttgtggccaaatatgaattttgtggtttcatagtaaaagattatacagttcttaaaaacgtgtggggttttctgtcccgttattcttgaccatcaagagaccatttttgtcagtttctccctatcgtcacatttttttttatatataaacagtttgaagaagagcctgtatatagcctagaaattttcaaaagtgactgaccatattaaactacatagattgatacctgtgcctttttattgttcacttgcctttttgtagttttcatccttctttgatatagtgtagtattaacaatttggaggtgtgaaacaaaaatggattcaagtcttgactaacttgtcttgaaccacttaaagctgtgtgattttaagtaaattacgtcacctttctgagcctgtatttcttcatctataaattgggattgataatctttaactcacagaattgagaggattaaatgagaaaccctgtataaattctcttgtgaggtaggaatgataacgtttaagagcttgagttgtggtggaaccatgcagactgatttgaatgctggattcgtcgcttaccatttggctttgtgcatattaaagttttctgtgcttccgtttcttcataaaataaagataatgatagaacctaccttatgaggttgttgtaaacattcaaacagtatctggcacatagtaagtgctcggtaaatgttaattataaattgcctagctgaatgtttgatacatactaataggccacctggcattaatattgtcatgacagttaaatgttggaagggggaacagtagtagccaaatgctcaaaatgaagttgtcattgttagttgagggataagtggagttaggtaaggaattttctatggcattagtgcttttaagcctacagaaaaagttagggctctaccaagaagccagggtccagtacagaaagagacaggtttggatttgaagcccgacaagtaatgttttcctctcctgaaaaatctgacaagttactaggcttctaagctttctcagcctctaagttatctcatctgtaaatgagataatgccctcttgcaaagttgatgtgagtaataaatgaagccgccagagcaatgtttgacatacagttaacttggatgaattgagtgatgctgctgttccctagtaagagtatcctccagtaggtatgcaggtagttacatttgtgggtgtgaacagtgtagaattgatagtgtttccctagagcatcagcatgaaggtttcttaggtagcttacagtggtgtggggaggaaatggtttcatccatgtgttggttccttcagcaatggtggtattttctttggcacttcggtttagattcttctggacttttttcctagggcccatttaaactttctcagcaaagcttgaccaatttttagctgtagactccaggatgtttcatgaacactttctgcttgtcactaggaacgtttaaaatgttaatttcctggaatttttggactacttaacattcagtcgtgagttaggattttatccagatcctttggaatttgtttttacatgtttatcacaaatctaaacagatcccgcttaggcatcttgagatgcacaagtaaacagctcttacctgatttttaaaagttaattgcatgtttaaagtgatagcttactagaaaagatatgtctagctggagaagcttgcacataggttttcctttctagtaatggatttattttttggaataaatttggcctttcccatagaaaattcagtgtgactttaatacacatgaaactttaatatagccttaaatgtttgactagtggatagaaatgtaatagtcttcaggatttcaggacatggttaatttaagattatagacagagctaataggtgtagagaacaatgccccaatcttttttgtttgaaaatggttgtatttacactttacttttaaaagcagtttcttaattcaatttcaaattgttaatcagctaggaatgtctcaagaaaaaattgcattactatagttggagaagctatagggaaaaagggatgagaagccaccttaattttattcctttaactgaaaataggaaaccaggttataaaaatatatctttgggtgtgggaaatatagtttatgttgtttgcagttttgtccataaaatgatagtcttaattagtactctgaaaaagagttgaaactaaaagagattatatatatgacattttgtaaactgtagtaatttaagccagaggatgctgtagagagtacttgtatgcaataaccttctgacagttggattccaaatacttgatttgtcttcatatttttgtcattcatttaaagtcagcagaattcaggtctgttaacgcaaagcattatgaaacaaaatagtttcctagggaacacacccctaggggcccaggactgattttggagatcttagttagccatgatctgttttgcaaggttaaattttgttttaaaggtgccaggaacactgtggcttgatggtaaagttagcatgaattttaaattacaccgttgttacatgtagcatcttaaaatatcttaaggatcagttcaagaggtcccctcacatttactttgttgaaacaaattctttttaataatggtttcaggcatcagttgtgacaaggttatctttatgcttttcatgtagacaaatgttggtaaaaggcagtaaagggtgcatcctgaggttaatgccatcatttcatgaaagaaaggatctctcaaaaaaaaggctaaattgataatttcctcttggatgtatatgactgctacttatatgcatttgttaatacagttgacccttgaacaatgtgggggttggggtgctgacccaccatgcagttgaaaatctgcatgtaacttttaactctctgaaaactaaactactaatagtctctactgttgcctggaagcctcactgataacataaacagtcaattaacacatactttgtatgctatatgtattatatactgtattcttgcaataaagtagagaaaaaaacttaccaagaaaattatgaggaggagaaaatatatttataattcattaagcagaagtggatcactataaaggtcttcatcctcattgtcttcgctttgagtaggctgaagaaaaggaggggttggtcttgctgtctcgggtgacagaagcaaatctgagtataagtagacctttacagttgaaactcatgttgttaaagagtcaactgtgtatcttctgtcttcaggctttaagttgctacgacaaaagtataaatcgtagaattacaaataaattacaccaattgtgttaaattaggttggtttagactaaacctgtgatgtgtttagaaaaagtttgaatgaaatgttgaaaagctgtcctagattatagacagaagacagtaatagtcggggtcagaagcattatcttaagatggccgtaactgggtgtctgattcaatttctatctctgctttttttaattctgctataggtattagagaatgtgtgaattggaattatttaatatacctgttagttgtaattgctttcttaagtaaaggccttttggtttgacatttggtcatttcgtaaacatgctgacctaaactcgtgtccctccctcagaaggaaatacgttaatttagtatgacatccttttttttccctttgtgcttatttatttatttatttttttgagatggagtctcactctgtaacccaggctgggctgggacacagtagcatcattatagctcaccaaagcccctaactcctggactaatgcgatctccctgccttagcctcctgagtagctgggattataagcacacatcactatacccagctaatttcttaatttttttaaagacgaggtcttgatatattgcccatgctggtcttgaactcctggactcaagcagtcttattgccttggcctcccaaattgttggaattataggcatgagccaccgtgcccagctttagtatgacattctttattcttttagaaagctttgagatattgatgcatccttatagaaattactttcatttatttatttacttacttaaaacagcttgataaagttggaaaaagcaggaccctaaataataaatatatttgccatcagccttttataggaaaactcagaaataataagtggaaatatttaggatgtcactcatcagactttttttttgaatatgtaaatgtgtttttttgaaaatttaaacacgcaaagtaaaaattaaaagttttggttaagttgtgaatttcagaaatttatcttggttatggtgtcctgaagttaaaaagaatagagcattagtacattagtacataaacgttctgttattctctgcctaagggcaagatccaactttgaaccaggtcctggatttcctctcatcttaaatcggagcctttttcatttgtagtataaataaattagccttttgatgctgtgattttatttgtatatgttatatatgagatttatatctctctttgtatgcaggcatttcactagattttgtttggccatctatttttagtgtttccctagcagcatgtttgctttacctgccttcatctaggtttctacatcatcaggggtggaaatattagttggcttaattaagcttgggagttgtaccttacttgctctgttgagtgtcagttctaccttcttttgaagcaggcaaaagcagttcatggcacaaatgccagaaatagcatgcaaaccactttgtagtggtatgcaaactaatttctgctgtgtccttttcttaatgcttgtgagggttactgtttacttaagagttaatatttggcttatgaaactagtatcagatgagaaattccagcatccctccccaccccagagaaagatgtggtcattggggactgctctgaagtctgccagccctctatcctaaaagttggtagatcagttattatatcttgatatgtacccctaattcatatgaggggccaagagagattagttactcctgatttcatctgttagaagataaagggagtgtggtttgtatctatattagagtaatgggaatgaagggtagggatggatgacagagatattttactcctaggaaaaatcagcaggacttggacagtgactagatacagagaattaagggaatagttgaatcagacatgactgcaagatgtcatttgggtcagtgaaggtgccattgattgtggttgaaggagtgagccgatttaggggctggctgaagggaatatataggtcagactgtcatgatgtgaggctcatatagctatgcatggagagaggtgttaaatcaagcaccaggattcaaagtgagctcttgaaggcagagacctcaatttgtcctttattcatcttgaacagactctgggacgtacctactgtcaattgaatgaaaatgctggcttcttccttctaagtggttctcatctcaggattgttttgcccccgggggacatttggcaatgtttagagaaatgctgggttgtcacaactcaaagtatgctactggcatccagtgtgtagagaccagggatgctggtaagcatgctacaatccgtaagacagcatcttctacctccccccgccaccctcaaaattttttagccccagatgtcaatggtgccaagattgagaaacactgttctaacaaacggcaaggaagttgactcctctaagccttggtttcctcacttgtaaagagattatgactacttcaggtttgttagaattagaccaggcagggtgtgtacaagtgcctggcatgaaagagcctctcagcaaatcctaatttcccttaccttacttgatgaatagatttaggggagttacttttggtcttttaactgctaatttcaaggcttcacgttttttttttttgtttttttttttttttttttttttttctgagaggtgagtgggatgcctaggaaacatagagtagcttttataatcttaatgcttttctcatggttttatcaaattatgattttgattatactttggtttgggtttgtactatttcaggattcagtatttagtgttcacctagcagtagacaatgaagttaaacccttagtgtagatcaatgaagttaagcccttaaattttactttttagcctgtaaatacattttatgtattatttattgctcacagaactgttattgtttggaagcaattttactattctttgaaatcaagaccaaaatgtactgaattttatttctcatggaaaatgctagacctcctatgtctattgcctttttcctttttatccatttattctaactagaccccccccgaagtcagaactcttccttagatttcctttttagggtcttcattaggtggctttcttttgcttgtcgggtgtctttttactttattttgtaaggtgttgaatattccctttattttgtaaggtgttgaatgtttcagtggtgttagggacaggaccaccgatattttcatctctaataccaatcccttagtgatctattccagtcatagcctcagtgtttaaagtctccttacatgtacatagttgtgtggcattctcatttttagggagtcactggaattctttgctgctatttctttccttttaggaaaaaaaccggtttactcttactatacattattttctccatctatagaatggaattactgtaggtaaaagtccttgagttcggtaaactatgtattggacttactaatgtacgttttattaattgcaggtggaatttagaaataacctgcctgtttttcatcttaaactaagattatttaaatattccattcattaattagttggttagaaaaattagcttttgaggaacaccacttaaacatggaaaataataacagagtacattttgtgacagcaaataaattatcggttaacttaaccctataggattcaaagttggtagctttaaatgatattaaattgtatttgactgtcaactgcttttaaaggcttacgtggctccccattgtacctgtagttatttaggtctggaagcacagggtgttaagaatgccaccataatgtcttttcataagggtttggtttgtcatagcctgtaaaattaggttcaccagttagctgctttatgaaatgaatgtcattggtcatggtgggggaggtattaggagaaggtataaaggaatctaaaaaaactttctttctttctctccctccctcccttctttccttctgccccttcctcccccctttcctttcctttttcctctttcccctttcccatttcccctttcccctttcctttcctttcctttcctttcctttcctttccatcttctgtattgctagtaaaataattgttgctcactgaaggctttaaaaaacactggttgcatgcttaatataggatggcaacaaaatggacgggtttaaaaaatatgtagatggtatgatacccctttcctccatccttgtaccaaatttctttcaaacctagaataatttatacaaacagatgtatcagtagatggagtattatgcccactttttaatttaatgatcaaaaaatgccaaattcttcccagagtggcagtataattcagatgtagttaactgttggatgcaaattcaattatggtagaaagatttactttactttgagaggtttttctaaaatcttctaaaattatgttgatttttaaaatttgaaataactttagacttacataaaaggtataaaaatagtacaaagaggtcctggatatcttttgcccagttactcctaatgttaacatcttatataaccatagtataattattaaaaccaggacattcacatttataaactatcctttttctagttcaggatccaatttgggatcctaccttgcatttagttatcatcatgttagtctcctcccatctgttaagcttttcagtcttttttttctctcatcttttataaatgttactgacacttttgaagagtactgttagttattttttagaatgtttctcaatatggggttgtcagatcttcacccgtgattagcatgtcttatgatgggtgaagttaatgtgatcacttggttaaggctgtgtctgccagatttcttcattgtaaagttactgctttttcctttgtaataataaatgttcattttaaccttgtagttgtataataattagtaattcctttgtaattaataccttcctctagtggggaggtactgcaaatatactgtgtcccatcatacttatcatgggccagttttgcaatatcctgtgttccatcatactttacatgggcaagttttgctatctatcaatggttcttaactggcagcagttattactgctttggtctttgcttaatggcgagttttctatttcactcattcttactatatttggaattctacaattaaggaagtactgtcctctttacttattaattatccaattaatttatttacatggctttgtggatattttgccttatgggttaaaatccagtaattgttgctcaagtcattctcgctttggttattgagggcacttgaaaatttgttcctgtgtcttttctacaataccctctctcattttgtgagcactaatttactttctggtatcacatgatgttctgggtgtatcttgtatttttcctgcttgcaccagccatggaatcaaccatttttccagggagctgagttcattttactagagaatgatatctagaaaccaagatctgggtgccaggtgtgctccatgctactgggtgtcattgcttctaggctctcttagtagatagagctagcagtgtatatgtttggtaacatgtatgaacacatatgtttttattttcttatctatccatctatgtatataaataaaaaactgccagtgatgctgccagttctgttcttccaccatagggtccattttggtcttttttcctgttcagcccttttctctttctttgttacttccttctccaaaggtgagaaactgttctcaaccacagtatattgacttacttgtttcatccgagtacacacaaacaaaagtagttttagaattagtgacctattcattccctggtgagaaacacagttttaaactagagtacaatatttgtctttaactttatggtatacaggcaaattctgttttcagaagttacttgggttcttttcatccctgcctaagggttatgttagtcacttgtaataaaattaggttcacttgttattgtttgtatgctgttttaagttcctcctacatcctgtttcatcatagcacagtatccctctcccatttatttatgataaagatgtgttcttaaaaggactggatttgcttaaggttgggtacagctgtaattgctttgccagacagcagttaaaggacatgtgctttggcaatcattctcttgggcttgcttgcctggttccttagtttcagctctcatttctacatcgtttacacttgggaattgatatcagctgtggccccataactgtcagtgcttgaaatcatgcccatcgactaaatcttatttgttctgtatgcacagttttagacccggagccacctacagtatgaatactaattctctcatagctgtggtaaatcatgaagtattttgtagaccctgtcctttactgggtttttctttttcaagatagaatcacttaccacaaaatttgtcattttaaagtgtataattcagtggtttttagtatagtcacaaaattgtatattgatataattctagaacatttttatcaccccagaaagaaaccccttacccattagcagtcacttcccattctcccctttcgctagcccctggtaaccactaatctactttgtctttatggatttgcctgttctgggtatttcatataaattgaatcatacaatatgtgaccttttatgtctggcttctagcacgtgttagtacttcatttctttttgcgatgaaataatattccattgtatggatatacacattttgtttattcatcagtttctactttttgtcaaaaaataacactattgtgagcattcatgtatgggtttttgtgtaaacatgttttcagttttttcaggtgtatacttaggagtagaagtgctgggtcatggtaattctatctttaatttattgagtaactgccatagtggttgaaccattttttcattcccactagcagtgtatgaggctttcttttaattaatttctccacatcctctccaacattttgctgttttttttttttttttccattgcatcctagggggtatgaagtggtttcacattgtagttttgatttgcgtttcccaaatgactaatgatgtgtcaaggatcttttgcatggattcttcatgcaaaagaatgaaggtggactcttatctcacagcatatgcaaaaatcatttctgcactctgacttctaatctgttggtttataagtctttgcagatccaagtaccacaatgttttggttactgtagattttgcgataagttagttttgcaactaggaagtgtgatgtgcttattggttatttgtatatctttggagaaatgtctattcaaatcttttgaccattttgtaatttggttatttacttttttgttgagttgtaagagttctttatatatatgtgtgtacacacacacacacacacacacatacgtttattctggatactggataggaatatattctatacttgtaccagtatacaaagatgtttacctaagagtgttcactgcagcaatgtttataagataattatcagagatatggtttgtaaatatttctcccattctgtggattacctgttcactttctgaatggtatcctctacatcagaaacttttaaaattgtgatgaagtccaatttatatatgtgtttcttttattgtttgtgctttatatatctaggaaaccattgcctgattcaatgtgatgaagattataagaattttatagtttaactctcacgcttgatccattttgagttcatttttgcatatgatgtgacataagggcccaccttcattcttttgcatagaatatccagttatcccaatactgtttgttaaaaagactattctttttccattgaatgtcttggcacccttgtcaaaaatcaattgaccagaaattatgggtttatttctagactctgaattctattctgttggtttatatgtctttgctgatgtaagtaccataatgttttgattactgtaggttttgtagtaagttaattttgaaactggaagtgtgagacctttaacagtgtctgcctttcttttttttttttttcagattgttttgtctattctggatcccttgcatttccatatgaattttagaatcagtttgtccatttctgttaaaaaggcagttggaattttcataagcattgccttgaattgtcctttactttgagaatataatattcttacttaggtacaaacataagactttttgagtactatgtttgggtgtgaccttattctaggtaacaagcatttcacagaaatagaaggccaaaaggtacatgaaaagatgttcaacctcagtcatgaagaaatgcaaattaaaaacaaaattataatttttcacttgtcagattggcaaagattagagtgtagtgatgactagtcttggctagactgtggggaaaatagaagcttctgagtttgaagtttttgacacagtccctttggagatcagtagcagtagctatcagaataaaaaatatgaacaaccaaagtttcactttcagaaatgtattctgtacctgtacttgcacaaatataccaagaagtttgtacaggatgtttactgcagcaacatttgtaataccaaaagacaggagtcagcctaaatatcatcaagaggactagttaaaattgaagtactgcatacaatgaaatgccctgtgagccactgaaaagaatgaggcaggttagtatgtaaggtgacatggagtccaagatgtattgaatgacaaaatttgttattgtgtggttctattagaaattaaaaaaaaaaaacaccagaaatacttgtatacacacctgtatagaaaatggctggcagtatacacagaaatagttaacagagattacttctgggcagtagaactggaaatctcattaaatcctttctcattacttgactttttttaaaacaatgagcaggtttttgttttctgaaaaatcattaagaatgactcagtagtgcaagtaaaattaaaattaatactactctttaggaataaaatatttgtttttttctgtcagtttgattgttttatatataatatctgttggtctctagagcagtttgattgttttgtatataatccctgttggtatccagaggtaaatgcattttattgtgatttttattgctgtgtggaaaatggattagaattagttcttgggtacaaatatttaatagtatttggaaccatatttttcatttctacatattgtaagtatgggagaaaaataagatttatcttttaagagttgtgattgtgctagtttttaatttatcaaatgaagaatatttaagaatatttaattctttaagtacaaagaatatttaagaatacttaagagcattgaagcctgattatgccactgttctttgggttcatgctctggaacttaaggttcagtgaagaaggtaaccatttcatagtatctcccttaacaaaggttactgatacattttcagaaaccttagtaccacaggcagtaaggaggcagtgagatccctctggattttgccagaccattcctagaatttttaaggtgaggggaccaatttcccaccccatatagaaatggcaccaacatctctcctagaaacttcctggtgattggaaactttttatctgttgatgctggttctgtctttagggagaatgtcatgtttcatgtaacatatcttaaaatatttgaagatacctgtcatatcctttatttagaaatctttattgaaatccaattaatggtcaggtactgcccttcatacttctctaggccgaatattcctaattccttccactgatcatcttaagacctcatttccagaaatgtcaccatagtatgccatgcttggtagcaggctctaatgatgccctaaactgaatatagacttctcaaggtatggttggattgttgtgaaatagtctaggctcattgactcgcttggactaaaaagctatctttctcataatgcagtttaggataatgtttacctttttagcaacaggtttacactgagaatgcttttacagctctttaaatgatgtatgaggtcaacttaacccatgtgtttgtctgaattattattgtagagccttagcatctggtatgttagtagttggtttttcggtatagtagtaggttttatatatatatttatatttatatttatttattgtcaatagagttagggtctcactatgttgcccaggttggtcttgaactcctgggtgcaagtgatcctgctgccttggcctcttaaagtgctgcgattacgggcatgagccacggcacccagctagtagtaggtttttacatttatttctcataagtatacgtgtatgcttttgtaaatgttgaggtggtggtatattgcctcttctcgttgattctgcctgataatcagcttgttagaattttgttttggtttgtagttctccttgaagaggtccttcacatcccttgtaagctggattcctaggtattttattctctttgaagcaattgtgaatgggagttcactcatgatttggctctctgtttgtctgttcttggtgtataagaatgcttgtgatttttgtacattgattttgtatcctgagactttgctgaagttgcttatcagcttaaggagattttgggctgagacaatggggttttctagatatacaatcatgtcgtctgcaaacagggacaatttgacttcctcttttcctaattgaataccctttatttccttctcctgcctaattgccctggccagaacttccaacactttgttgaataggagtggtgagagagggcatccctgtcttgtgccagttttcaaagggaatgcttccagtttttgcccattcagtatgatattggctgtgagtttgtcatagatagctcttattattttgaaatacgtcccatcaatacctaatttattgagagtttttagcatgaagcgttgttgaattttgtcaaaggctttttctgcatctattgagataatcatgtggtttttgtctttggctctgtttatatgctggattacatttattgatttgcgtatattgaaccagccttgcatcccagggatgaagcccacttgatcatggtggataagctttttgatgtgctgctggattcgttttgccagtattttattgaggatttttgcatcaatgttcatcaaggatattggtctaaaattctcttttttggttgtgtctctgcccggctttggtatcagaatgatgctggcctcataaaatgagttagggaggattccctctttttctattgattggaatagtttcagaaggaatggtagcagttcctccttgtacctctgatagaatttggctgtgaatccatctggtcctggactccttttggttggtaaactattgattattgccacaatttcagctcctgttattggtctattcagagattcaacttcttcctggtttagtcttgggagcgtgtatgtgttgaggaatttatccatttcttctagattttctagtttatttgcgtagaggtgtttgtagtattctctgatggtagtttgtatttctgtgggatcggtagtgatatcccctttatcattttttattgtgtctatttgattcttctctctttttttctttattagtcttgctagtggtctatcaattttgttgatcctttcaaaaaaccagctcctggattcattgatttttttgaagggttttttgtgtctctatttccttcagttctgctctgattttagttatttcttgccttctgctagcttttgaatgtgtttgctcttgcttttctagttcttttaattgtgatgttagggtgtcaattttggatctttcctgctttctcttgtgggcatttagtgctataaattgaggatacaaacaaatggaagaacattccatgctcatgggtaggaagaatcaatattgtgaaaatggccatactgcccaaggtaatttacagattcagtgccatccccatcaagctaccgatgactttcttcacagaattggaaaaaactactttaaagttcatatggaaccaaaaaagagcccgcatcgccaagtcaatcctaagccaaaagaacaaagctggaggcatcacactacctgacttcaaactatactacaaggctacagtaaccaaaacagcatggtactggtaccataacagagatatagatcaatggaacagaacagagccctcagaaataacgccgcatatctacaactatctgatctttgacaaacctgagaaaaacaagcaatggggaaaggattccctatttaataaatggtgctgggaaaactggctagccatatgtagaaagctgaaactggatcccttccttacaccttatacaaaaatcaattcaagatggattaaagatttaaacgttagacctaaaaccataaaaaccctagaagaaaacctaggcattaccattcaggacataggcatgggcaaggacttcatgtccaaaacaccaaaagcaatggcaacaaaagacaaaattgacaaatgggatctaattaaactaaagagcttctgcacagcaaaagaaactaccatcagagtgaacaggaaacctacaaaatgggagaaaattttcgcaacctactcatctgacaaagggcaaatatccagaatctacaatgaactcaaaccaatttacaagaaaaaaacaaacaaccccatcaaaaagtgggcgaaagacatgaacagacacttctcaaaagaagacatttatgcagccaaaaaacacatgaaaaaatgctcatcatcactggccatcagagaaatgcaaatcaaaaccacaatgagataccatctcacaccagttagaatggcaatcattaaaaagtcaggaaacaacaggtgctggagaggatgtggagaaataggaacacttttacactgttggtgggactgtaaactagttcaaccattgtggaagtcagtgtggcgattcctcagggatctagaactagaaataccatttgacccagccatcccattactgggtatatacccaaatgactataaatcatgctgctataaagacacatgcacatgtatgtttattgcggcattattcacaatagcaaaaacttggaactaacccaaatgcccaacaatgatagactggattaagaaaatgtggcacatatacaccatggagtactatgcagccataaaaaatgatgagttcatgtcctttgtagggacatggatgaaattggaaatcatcattctcagtaaactatcgcaagaacaaaaaaccaaacaccacatattctcactcataggtgggaattgaacaatgagaccacatggacacaggaaggggaatatcacactctggggactgttgtggggtggggggagggatagcattgggagatatacctaatgctagatgacgagttagtgggtgcagcacaccagcatggcacatgtatacatatgtaactaacctgcacaatgtgcacatgtaccctaaaacttaaagtataataaaaaataaataaatttaaaaaaaaaaaagaattttgttttggttatgaggcaaggtgggtatccctctccagccttgagttaatgtcatcttggataagtatgctattcagtatttatctgagttgttgataaaatattaacagaatagagcctcgtggcatacctagtggtactgagttattaatactactggcccacctgtcagaaattatgcagtttagctgtgtattttcatgtgacagtgtttataaaatgtcttgttggcatcagaagactgtacagccttactgtacttaagacatgctgtttttaaatgattgttttctccttttccaaagttaaaatctgctgtatttatttaagatttttttggtgtgtgtatgggggaagaggggaggtggaaggatgaaaagattctttgcactaagtttgcttttggttaaaaagaagcctgtattcttagatcttaaatctagtctcactatactaaaattagtcccctaaactggatttactttgaaacttttggatgacctgactaatttaaatattgtacaatagttaagaaggaggacttttagtgttacacaatggttcggttcctggccatatcacttactagttttgttaatttctttttgtgttgggcacattacttctttaatctttaatttccctatctaaaaaagtagtaaaaataatgccctcttcagattgttttccgaggattaagtgaagtattagaaataaagcactcagcatcaagcactggtacttagcagcttaacgggcaaacctgctctttccctcctcctcctcctccttagtactcttcttcctattatgtttcctccaactgttactgtgataacatataaatgactaaatgtgaaatcagtagagttttagactttttttttaactcaaagcttcaaactaaaaacagtgtatttcttgcagatcctttaaggataaatagttgatcttttaaaatgaaagtgccctgtgaaagtttcatagctaaacatttttgttctttagtttaaggcttaagccatataggtttttttgtttgttttttttttgatttgttttaactagtcaagtgcatttcagtgagaagggagaaagagtagaaaggtgttggatctgtaactgactgtgaacaatcagttgagataactcaactgccttcagaccagccaagccctatagttttacaagaaaaaacccattcaggttagtaactcatgttgaattacttttggctactttgtgttcaataatatcattctggggtgtctttgtcttttttggggggcaaggaaatggggtcttggtattttgcctagcttgggcttgaactcttgatcttctgctttagcctcctaagtagagggtgtctttgattatatcttaataaaaggattggaagttgaagcaaggaattaaaaacataaatgtgaattactgatagatgttaggcaagtagttgtgtaggtgggactaacttgcttgactaagattttgattgcccatccctttcacgttctacctccctaccccataacataccttgaacatgaaaacatggggaacatagatttcaatagaagaagcccaattatttgtgaataagtatgagaaccatctggatattctgcagttgttataatacagagcaaatagagcattagcacctacgggaaagcagttggattgttgaatcttctttgacttgtttgttgctttggatgacaggagggttccttcctacctcttagtaaagattgggaaagaaaagagttaattgtgaacttactgggattaattcattctgggttttttttttttcccccccttgagacgatgtttcactctgttgcccaggctggagtgcaatggcgtgatcttggctcactgcaacctccgcctcctgggttcaagcgattctcttgtctcagcctcccaagtagctaggattaaaggcgcctgccactacgtccagctaatttttgtatttgtagtagagacagggttttaccatgttggccaggctggtctcgaactcctgacctcaagtgatccacccgcctcagactcccaaaatgctggaattacaggtatgagctactgcgcccggcctaattcattcttaattataagaatgtacagtttttgtttagggatatagtgttagttgaaaaattagggaaaaagtctgttacttagcttagtttttcatttatccttttatttagcagttactgagtaccagctatatgccaggcatagtgagtgttggtttgtgtgacctgcagttcttgtagctattgagtttatagtgtagttgagggaaaaacacgtttggatgagcagtgatagttacgtggtaggggactgagtgtgagtaatcggttcagggttgtcgcaagccaacacaaaaaagctcatagaaggaatgaggcctaaaagcttagtgtagggtatggagtgtgcaggctggacctggcttttgcctgcagaaatgtgctacaagcatttcagacaaagggactcagtggtagacctcttctacatatgccacttcagtagtgtggttttagattttatatttagccatttatatttagcctgaggcgttctgagtcagtccaaatccactgtcactaaataaatgggttatgtatcttaataacagaggattagccatccttatatgtgaagggcagcattactgggacatgtaaagcaaacttatttgtgacaacagaatatttaagtatagttaataaataggattcttatagtctcctattaggtaacattccttttagagatcctcatggagtatgagtatttaaagtgaggtggaggccaggcacagtggctcacgcctgtaatcctagcactttgggaggctgaggtgggtggattgcctgagcttaggagtttgagaccagcctgggcaacacggtgaaaccctgtctctactcaaaaaaaaaaaaaaacaaaaaattagccaggcatggctgcatgtgcctgtaatcccagctacttgggaggctgagacagaagaattgctttaacctgggaggcagaggttgcagtgagcagagatcgcgccactgcactccagcctgggcaacagaacaagactccatctcaaaaaataaaaataaataaaaaaataaagtgaggtcgaaactatgattttcttggaggacgggcccaaaaggtgattgattagtagggttaaagattaaatttgtgcttaaatttatatatatattttttctttcttctttttttcttttcaaagccattatgtattgctgcagtaccaatttcttttgccttagcggggaaacagctggtaccattgcaggcagaattcaagttccctgattaatgaagtggaggactgtttgaatctttaatgtcttacctttatgtgtaacttgacccctcagttctcctttttctttttttattcagccactcgacagctcaatttttctttttctttttttattcagctctcagttctctatctttttattgtccaaaaaccatacaaatggtgttttcttgcccacttttcttactcatgttgaggattggtttttctaaacatagcttttgtaaatcaatgtgtactgactgatttcacttccctgattatatccttaaagcagctaaggtcattggttactataaatgaagtacacacaagtccgtgacttgtgatggtttgacttaggatttttcaacttcacgatggtgtgaaagcagtagacattcagtagaaactgtacttctgttcttcactttcagtacagtattatttattaaatacatgagatagtcaacactttataaaataggctttgtattagattattttgctcaactgtaggctaatgtaagtgttgctgagtgtgtttaaaataggctatgctaagctatgatgttcgcttcggtaggttaggtgtatgaaatgcatttttgacttgttactttcaacttatgatggatttgttggcatattatcccattgcagttgaggagaatagtggattctatgaagataaacttaactaccaggtaaaagacatttcttttttttaaaagcagattaataatatgtgaacgcctttggatttgttttatctaagtaagactttagattttgttgtgttatagatggtttgcaattgtgtttaacacataacagctgggaatgagtgccagagtattatttctgaatcttgcttacatggtagtgtgtgctaaaaattaagatgtaaaacttttgcttttattttacctcgacatttaaaaacactagtaaaacttgggatcaggtgaaaacttttttgttttacttgcaaaaatattctcttaaaaatattgtggtaaagagatctagcctcttaatgaattttaaagtatacattattgttggctataggtacaatgttgtacagcagctctctagtgcttattcatcttgactgactgaaacttcatgagctttgattagctactctccatttccccttctcccagcctctgctaaccatcattccactctttgatttttatgaatttgtattattttagatagtggagttatgcagtcatttgtctttttgtgactggcttatttcacttagcatggtgtcctcaagattcacccatgttgtgccattttgtagaatttcttttttttttcaagctgaagttttatttaaattgtaaaagaaatggttcccaaaaaatgctggcgaataaagcaaaaggataagatatagtgctcccttcctacgagttagccagcctatccgagtacagggtaatatatagtacttaatgctggtagaattttgcagtagtttagaaagattatctgtgcctagattatgaagagattctcagtgtgtgatgcttggttctgggtttacaccttactgggcatgaacaagagccctctccttggccatagccaaatcccttgggcccaaagttctttgcatagcaccctttacaatagatttcaccttctttttcagtcaggagttgttgattcaagactcttcccacactttgcacatcggaaatagtttttgttccagggctttccagctccagttaccttctcagcagcatgtacggaatccccacatctggaacacttctcagcacctctgtatttctgagcaaatttagaagtctttggatttgcttgtaggcatgtgaggctgaacactctggcttgatgcccaggctctcaccacggtccatgttaagtatgccagcgccctggccataaactgtagccttttggcccatacttctttccatagcaggatttgcagtaaatctcttaatcatgaattgccactgtcttgctatctaaattattcctgcaaatcatgcatagaaagcagcagcagtgggccgggcgcggtggctcacgcctgtaatcccagcactttgggaggccgaggcgggcggatcatgaggtcaggagatcgagaccatcctggctaacatggtgaaacccggtctctactaaaaatacaaaaaaattagccaggcatggtggcgggtgcctgtagtcccagctactcgggaggctgaggcaggagaatggcgtgaacccgggaggcggagcttaccgtgagcctagatcgcgccactgcactccagcctgggcaacagagcaagactccgtcttaaacaaacaaacaaacaaacaaaaagcagtagcggtggaagctcctgccattacactgcacctcttctgcgtggtgcacggccctcccgcagaccccacacttgtttccacctctccacgcaggcattttgagttggaggcaggagcacgcatcacaggcggagctagagaggctgggctggagggagtgtccagggagtccgagatcgctagaattttagaatttctttctttctttcttttttttttattgagagagttttgctcttttcgccgaggctagagtgcaatggcgcgatctcagcttactacaacctctgcctcccaggttcaagcgattctcctgcctcagcctcccgagtagttgggattatagacgcccactaccacacccagctaatttttatagtagagaaggggttttaccatgttaaccaggctgttgtcgaactccttactgcaggtgatccgcctgcctcagcctcccaaagtgctaggattacaggcatgagctaccacgcccggcctagagtttcttttttaaggctacatagtattccattgtacatatattccacattttaaaaatcctttcatctgttggtggacattaggtttctgcagctatcactatcacattgtgaatagtgttgtggtgaacatcggagtggtaatatccgtttgagatcctgatttcattcttttggataaataccccaaagtgggacttctggaatatatggtagttctgtttttaaatttttgaggaagcttcatacttttttccatagtggctgcaccattttgcattcccaccaacaggattccaatttcttcacatcctcaccaacagtagttgtgttttgttttgttttggttttttgataatagttttccttacaggtgtgaggtaatattgtgttgtggttttgattttcatttccctaatggttaatgatgagcatcttttcatgtgcttactgcccatttgtatatgtttggagaaatgtctgttgatgtccttagcacatttttaagttgagttatttgtgtttttttactgttgaattattggagttctttatatatttggagactagccccttgtcagatgtttgcaaatattttctctcattccgtaggttgccttttactctgttaattgtttcttttgctgcgtagaagctttttagtttgatgtagtcccacttgtttatttttgttttggttgcttatgcttttggtattaaatccttgagataatcgccgacaccagtgtcatgaagcttttcctgtatgttttcttctaagagttttagtttcatgtcttaggtttattaaatcattttcagttgatttttgtgtatggtgtaagaaaagggcccagtttattttttttaggtttttacatgtagatatgaagttttcctgatgccattcctttcctcattgtatattcttggcatctttgttgaagatcagttgaccatatgtgtgtggacttatttctaggctttctttctgtgttcttgtggctctatatgtccgtctttatgccaataccatactgtttagattatggtagctttgtaatattaatatattttgaaatcaggaagtatgatgcctccagctttgttcttttacaagattgatttggctatttatggtcttttgtggttccatatgaattttagaatcgtttttccatttctataaaaaataccactggaattttgatagtgattgcgtagaatttatagatcactttgagtaatattggcatttaaaaatactaagtcttaacaaaacgtgagcataggtgtttctgtttttttgtgtgtcttgtttaatttcattcattgttttctggttttcaataaacaaacctgtcacctcattcaagtttattcctaggtagttaatttttttctattgtaaatgagattgttttcctaatgtccttttcagatagttagtgtatggaaacattactgatttttatatgttgattttgtatcctgctactttactcaatttgtttattctaacagttttttaaaaatggaatcttgcgagttttctttcttttttttttttttttttttgagacggagtctcgcacagtttcccaggctggagtgcaggggcacagtcttgggtcagtgcaacctccgcctcccaggttcaagtgattctcctgcctcagcctccgaagtagctgggattataggtgcctgccaccacacctgactaacttttgtatttttagtagagatggggtttcaccatgttggctaggctggtctcaagctcctgacctcaagtgatccgcccacctcggcttcccaaagtgctgggattataggcatgggccactgtgcctggcccaaaagggacaattttactacttcctttctgatttggatgtattttttttattttattaagcatttaatttattgcttaattgctttggctaggatttccagtactatgttgaactgaagtagggagagtgggcatccttgctttgttcctgatctttcaggaaaagtttctgttttttgctattgaatataatgttggctgtgggcttttcatatacagtctttattatgttactttctttttattccttgtttgtagagagtttttataatgaaagggcgttgatttttgtcagatgctttttctgcatctattgagatgatcatgtgatttttatctttgattctgttaatgtggtatattaatacattttttatatgttgaatcatccttgcatcacaagggtcagtagatttccctggtatgaaacccacttgatcatggtgtattacctttttgataggctgttagattcagttagctagtattttgttgggaagttttgcatctatatttattaaggatattggtctgtaattttctttttttgttatattcttcccttgttttggtgttagggtgatactggcttcatagaatgatttacggaggattccctctttatctttaggaatagtttcagtaacggtagtaccaaatttctttgaatgtctgaaataattcagctgtagatccatctggtactggactttttttttgttggcaattttttcattcctgtttcagtctcaccacttgttattggtctgttcagagtttctgtatcttcctgatttaatctaggagagttttatatttctaggaaattaaccatctcctctggattttctagtttgtgcatgtaaaagtgttcatagtagccttgaatgatcttttctatttctgtgttatcagttgtaatatctcctgtttcatttctaattgagcttatttggatcttgtctcttcttttcttggctaatgttgctaatggtctattgattttgtttatttttttttaaagaaccagctttttgtttcatttattttttgtaattttttgtttcaatttcatttagttctgctctgatctttgttacttattttcttctgctgggcttaggtttggtttgttcttgttctctagttccttgaggtgtgaccttagattgtctgtgctctttcagactttttgatgtaggcatttaatgctgtgacctttcctcttagcactgcttttgctctgtctcagaggttttgataagttgtgtcactgttacccctcagttcatagaattttaaaatttccattttggtttcattattgacttgaagtcgtcattcaagagaagattatttaatttctatgtatttatgtagttttgagggttcctcttggagttaatctccagttttattccactgtggtcagagaggatacttcatataatttcagttttcataaatttattgagtcttgtttaatggcgtatcatatggcctgtcttggagaatgttccatctgctggtgaaaagaatgtatattctgcaattgttgggtagaatgttctgtaaatatctgttaagtctatttgttgtagggtatagtcttaagtccattgtttctttcttgactttctgtcttggtgacctgtctagtgttgtcagtggattattgaagttccctcactattattgtgttgccgtctgtctcatttcttaggcatagtagtaattgttttataaatttgggagcttcaatgttaggtgcatatatatttaggattgccacattttcctgttgtactagtccttttatcgttatataatatccctctttgtctttctttttttttttgttggagacagagtcttgctctgttacccaggctggagtgtagtggtgcgaccttggcacactgcaacctctgcctcccaggttcaagcaattctcctgcctcagcctcccgagtagctgggattacaggcacacaccaccatgcctggctaattttttgtatttttagtagaaacgagttttcaccatgctggtctcgaactcctgcccttatgatccacctgtgtcagccttccaaagtgctggggttacaggcgtgagccaccacacctggcctcctttgtccttttttaactgttgttgctttgaagtctagtttgtctgatataagaataactacttctaggccggaagtggtggctcacacctgtaatcctagcactttgggaggcataggtgggtggattgcttgaggtcaggagttcaagactagccttgcaaacatggtgaaaccatgtctctactaaaatacaaaaattagccaggtgtggtggctcacgcctgtaatcccagctacttgggaggctgaggtgggagaatagctgaacccaggaggtgaaggttgtagggagtctagattgcatactgctctctaacctgggtgatgaagtgagactctgtctcaaaaaaaaaaaaaaaaaaaggataactacctttgcttgcttttggtttccattttcatggaatatctttttccatccctttatcttatgtgagtccttctgtgttaggtgagtctcttgatgacagcagatccttggttcgtggatttttatccattcttccattctgtatcttttaagtggagtatttaggccatttatattcaacgtgagtatttagatgtgaggtactgttgttttcatcatgctagttgttgccttaatcccttagttttttgtttttgtttttttttttcattgcatcattgttatataggccctgtgagatatatgctttaaggaagttccattttggtgtattttgaggttttgtttcaagatttagaacttgtggtgctggtttggtagtggcaaattctcccagcatttgtttgtctgataaagactttatctctccttcatttatgaagcttagttttgctggatacaaaattcttggctgataattgttttgttgaaggaggctaaatataggaccccagtcccttctagcttgtagggtttctgctgaaagatacactgttaatctgataggtttttctttataggttacctgatacttttgccccacagctcttaagattctttccttcatcttgactttaggtaatgatgactatgtgcctgggccatctttttatgatgaatttcccaggtatttttgagcctcttgagatttggatgtctagatctctagcaagaccggggaagttttccttgattatttcctgaaatatgttttccaaactttcaaatttcttttcttcctcaggaacacgaattatttttagctttggatgtttaacgtagacccagccttcacggatgctttgtttattttttttaaaataatttttctttatcttggcagattgggttaattcgaaagcattgtcttctgtctctgaagttctttcttctgcttgttcgattctattgctgagacttcccagtgcgtttggcatttctctaagtgtgtccttgatttccagaagttgtggttgttttttatttatgctatatatttcactgaagaattttccttttatatcctgtatcatgtttttgatttctttaagttggacttcagctttctctggtgcctcctttgattagcttaataattgaccttctaaattctttttctggcaattcagagagttcgtctttgttcggatccattgctgatgagctggtacgatcttttggtggtgttaaagaaccttgttttgtcatattaccagaattgtttttctggttccttctcatttgggtagactatgtcagagggaagatctgggattcaagggctgcttttcagattcttttgtcccatggggttctcccttgatgtggtgttctcccctttcccctaggaatggggcttcctgagtgccaaactgtagtgattgtttttgctcttctgggtctagccacccagtcgagctaccaggtgccaggctagtactggcgagtgtctgtaaagagtcctatgatgtgatccgttttcaggtcttgcagctgtggatactagtacctgctctggtggaggtagctggggagtgaagtagactctgtgagggtccttggttgtgtttttgtttagtgtgctggttttgtgttggttgtcctccagctgggagttggcactttcaagagcatatcagctgtggtgctacagggaggatgcacatttgccctagagacacttggtcaagtattcaggtttctcaggcagtgagcaggcccatagagctcccaagagattatgacctttgtctttggctaccaggatggctagagaaagactacgaggtgggggcaggaataggggtgtctcagcctctccttgggtgagcttgctgcagctgctgttgcggggggtggggtgagggtgtggttcccagtccagtggagttatagtcccagggggattgtggctgcctctgctgagtcatacaggccaccagggaagtgggggaaagctggcagtcacagaccttaccttgcttccatgcaacctgtggtcttaaaggctggtctcacttccatcatgcctccccaacatcaccaagtctttttccaggtagccggttaccagggtggatactttgccccagaccacaagcctcccccttgagaaagcaaatggactcatagtttttaggcctcccagagaacctgcagtggtgatccaatttcttcaaagggtctgtggattctcttggctttcctggtttgttcctgtggtagttcttgtattgtagcaaaagttcatgatgtgagtctccacatgttgctctgtctgtcagaatgggagatacaagctagtcctgcctcctatccaccatcttaatttgagcatctagatatagtttcgaataatgtgtatctacctacaaagttcaggcatggaacgaggcaaataaaacaaacacaaaaactggatagcaaaactactccaatgaggagataaaggttttcaaaaagtacttgaactggaaagcctaggtgatactaaaacattaaataaaatagtatatccaagacccagtatgtgttaatatatgggataaccagatcgttttaactgctctggctaatcctcatttctataaatatgtagacaaaactagcactgctgtatggtaataactaccagtatactgctttgtcctttaaaatgtgtctgccatactaggctcaaactattaaaccaagtttttctactaaggctaggaatgtcacatgtatgcagggatgagaaccttatcacacacactcacgctcacataccaggtctctcagcccttgggcgtcgccttccaactccatgtgtattttatgcatgtgatctttatatgtgttctttcgctgttttcctatcatgtgaaacacattaaacatctcaacacatttgcgcctggttttggttgcccagtagtattcttgtgtgcaatgaaaccagtgagcaagtacacatagtaggaattataccatcttggtagaaaacagctatataaacacggatgtacatatttcactggaaatctcaaggacccacctcttcagtctgtagcagaagtctgcttgccacatcagatccttttacccttcacctctattcttggaccccaaagcagggccagtgcttttagttttgtatctggtgtcctcaaaatgaatatggaaagttcataaacactatataagtactatgtgaatctggttgaaaacaggtaaaacaacaaacctacatatactaactggtagttaaatttatttcacaagaaaaccatctttaagattttttttttaactttttttttttttttgagacagagtctcgctctgtcgcccaggctggagtgcagtggcgtgatctcagctcactgcaagctctgcctcccgggttcatgccattctcctgcctcagcttcctgagtagctgtgactaccggcgcctgccaccatgcctggctaattttttgtattttttagtagagacggggtttcattatgttagccaggatggtctcgatctcctgaccttgtgaaccgcccgcttcagcctcccaaagtgctgggattacaggcgtgaaccaccatgcccggcctttttaactttttaaaatagagaaaacagtatattccttggggaaagatgaaggattgagaaaaccagctctgggtaaaaattattatgactgcacctggagttgattaggcctgcctaggaaagaaacaggcaactgctatatgaccacaggggacagccaccatctgagtctcagcagactagttcacacgccatgcaatgttgctgtatattcaaattgtaaaaatcatctagcttatcatgaaacaagctgcatttatcatcagagactgtcaggtcatcatctccacctgcagacagagcttaagcagcatctcacctatctcaaagatgacagactcttgtcactgttgtcaaaggggttgctgttctgtttcctcagtgagctcccagagttggttccttccttgggccctgtatctgtttatgttcccattttctgtctctggctccttttaccaccatcagggtaggcagacttggaacaattctctccaaatgggcagcttccatgttcttcgttaaaatacctacatgccttatcactcttcatctccttgtattcctgaaatgagtttctgctaccttctactccacgcagtactcatgtggaatgacaaagttaaatatggcctggcattctgggatggactttaccatcttgcttttctgttgcttagtactcctccacttgtgaacacacttgaggtgcaggtgtggttgcagctggagagcatctcaaagcagccctttatatatttagagagtatcatgcccctttagtgttttattgtttattatatgaaataataccgtttcctactctggagatttacagctactttgagcccatggaatacccccaaagggttttatgtaaagtgtgttcaaatgtagaccctatctatataccaactaccaaaggattagttgagaaacattttatgagtaaggctgtcatattgcatgctgggtactagagttagcaatttccaatatattattgatagaaaagtaaacattaataggaaattatcatgaactgactttactcaccttgtttagtctgtattgaccttgttggaagaaaagtattaatagctgtcatttgagctcttactagtggtaagtcaaatgctgtgttagtgtatttaatcctcaaacatctctgtttagccatattatccccaggttatatatatgaagaagatgaggtttggggatcttagaaataagagattttattgatctgtcactgcaggcagtgtaaatatatttgattcttcttaattttgctttatgatctcacaagatgaaataactatgtcatctatttcaattctcattgttttaagatttaaatcattttggggggaatcttctccaatgttttacttaggaacggttcaatgaagtctttcccctgtcctagtttgttttatagatttgaaataagggcatttcagtggctctaaaacatgtgtgtagcttttgtaaaattcctaatcttttctctaagtttttacatttcttaattatgtaaaaatattatgctataaaataatttcagtaatttgcagtaaagaaaggtaatctgtctctagtttcctcatatttattcaccgatatctcctcattaaaagttgaaaaatactactgctctttgttttaaagtatttaaacgtccaactgtactttttacataaataagattagaaaacatgaatttgattgttccagaaactcagtcatactgagagaagactttttttcctcagcaatttactattttttggagtaaatgcaaaaagcctttatgtgtgcaggcctctgtaatgacactctaatgtagtagaatcttctttgatttcatttgcttaaagatactgctttaaaagttttagggaaatattttatcctaaaaatgttaattatccaaggttgaaaagatcttacctgacagcttaaaaacttgtatctgggcagtaagatgataattttagtttcagtattattttaattgagtggatgtgtggcaattcaagtgttttcgtctcttaagtttcagtagtgggcagcttttgtctcccttctgttttcactcaaagcattttgtctgtaaagaatctcagcttaggactcaaaacaagtctgtgttgaggatttatttctagagttgtgttaaacagttttctgtagctatagataattacttatgaagctgcatcaagtacgtaccttgattactactatctcgtgactaactgcttgttcacagccttccccacccttcccaccagctccccttcactaacctgtgcatcctttgcttgtctggtctcttttacttcttgtttttctcctagtttgtgaatagctcttaaagtctgacttgttgtcatggtgcgttgaaagagtagccagttgtcttttctgggtagatcagctatgagctgactgactaagaggagtagttaaaatggagaaagcttagctgtactttgtcttgcatgttaaacgtaatgagtttagaggattatgattatttgtaatcatcaggatctgctagacaggacatctgttttactttttactcttatgttggtggagaaatagcgtgcttttcattcaatgtgaaaattttgtgttctagctgggcaccgatggcttagtttttgaaatgtaatttcttgagaagtagcatgtggttagtataaaattgtctttcctattaggactagctacgtaattagtctgaaatatttttctaactggaaaattagttgctgtgaacttttggatttttattattctagactgcattacacttgtttgctatattcaaatattttttctttggttttacttcctaggttgcacgttttcaaaaaatacctaatggtgaaaatgagacaatgattcctgtattgacatcaaaaaaagcaagtgaattaccagtcagtgaagttgcaagcattctccaagtaagtggttagtggggaggaagggactagatggtgtaaagtcagtcacttagactctataaaacagtgctgtctaatttacttttcttcagtgatagaaatattctgttctgtgccattcagcatagtagccacaagttgaacaggactgttgagcttgacatggggttaaacttgacagaattaaacatgactatatgacttgaaatgtggctagtgtgatggagaaactgactttaatttaatttaaatttatttaaataactacaggtggcttagtggctacctgattggacagtgcagctctagaacataatagcttttctaggaactatattagtgctgtgtaaggattggttggattaggaaaataattaacgtaagtagtggtaggagtttatctttttttgataagggttttctaaggtaaagtaaaaacttaagtacaagtttagaattgcagataatctgtaattgcttatgtaggctcttcctggttttcaaaagtagtatctatcgaaacatgaaaaagataatattttttatttttccttcagcagtcacatatcttagtgatagcattaaaaacatgggtatccttttttaggtttttgttgttgttgttattgtatttatactctgctttaaaaccacttatttgtaatatgtttgttttgaaaggctcctttattggactctattataataaccttttggtcagggcaactattttgggggtacagataattttattctttaatagttagaatactaaatcatgagagagaataactgaaggatgtaggtagtgtttatagaacataaactgttccaagaagaagttcatctgaacttcactgcttttgagtaatttaggaagcacaaaatttgagcatgaaataattacacagtccaagagtataaattaataccaaccccagggttttgataggcccagagaacaaggaagacatttatggcccattgaacgttctttgggagaaactaattttagaaaatggcgaaacaacaatgaaaaggaaaaagctaattaaaatgtactgttatgctttctgtaagtcttgtggctgattgtgttatttttctccctaaattttgtttgtttggtaaactctgcctttttgtttacattttttttaaaaaatcaattttgttgagatataattcacataaaatacaatgtactttttaaaagtgtacaatttgcattttgacaaatgtaatcaccaccaccattaagatagaacatttttatcactccagaaagctcccccatgtccctttgtaattaatccctccctctctatgtgtcacttctggtcccaggcaaccactgataggttgctctcataatagactagttttgactgttgtagtttctgtaaatgtgataatacattatattatgtgcttttttgtgtttttcttttctgtgctaacattttcaataactttcatgtataaactctaataggctgatcttcagaatggtctaaacaaatgtgaagttagtcataggcgagcctttcatggctggaatgagtttgatattagtgaagatgagccactgtggaagaagtatatttctcaggtgagatacttttacttcctcttctactgtgtaatttattaatacatggacttctgttatgtagttgcttacttttgtgatactgtttatggagaaaggaaataatttttagatgttttttacctaaaatttttcatttgttggggcttactgttaggttggaattcctgtatttttagtatgtaaatcttaaagacaacattttccatatgggtatattacacaaagataatactgttgacagtagtgtcctttgctgatatcaaacctacactatttaaatgataggactggcaatattttttaaggtaatcatggccagctcagaaaactagtaaaaagtaagttaggtaagttaaactcaggctgcctgggtacaaattacaccttcatttcttaccagttgtgtcatctttattatcctctgagccttatctataaaatggtgatgataaccttacgggagatagttagctctcagtagatgatagttatttatattttttcatcctaaattttaggaaagacttattctagactgcttttatcttgataacgattgtgttaatgtaaaaagttacaggttactatgattagttttgaagtaattaggttggtttgctaaacaaatattttttgctaaaaacttctttttagtaaatgtctgtgccttttaacctgcggtctttctaaaacgatctatgtttaacttttctaaagtgccttttctgctaatgagcttaaatttgccaggcttaattttgcgaatgagtttgtctaaagtagcaacactggaattttaaaggttggatgaaccttgtgtgtatatgtcttatttttatggaatattatttatatgtgtctttgtattttcatacttaccacattcccacattaccaaagacttcagaaagcattaacatagtttactctggatttataaattgtaatgatttgacttatccctaggcagtatgatttaatgttttactttcttgatcctgttaccaaagctagagcacctgccccttgggattcctgtgagaattaaatagtgcctgtaatgtagttaagcacaactaaacaaataacagtaaatagtaatcgtaatcacaaagcactgggtgattctttattcctctgcagcctgccatccatcaagtggtgtgcttagtaatgtggcacagcttttttaggggaaaataaaaaagatcatgggtcttgccctcaaagtgtgacgttaatagctaacatttttaagaactttttttggtttacacggtgctttaatgtacattcttagttaatccttataacagttctttggtataaggttctgttttaccagatgaagaatctggagcttaaaaagattaaggtgacacacagatgccagcaactggattcaaacctaggtactctgactcagtcaggtttgtggttggtcagccctgaaccatattgcagttgcagtgttattttattagggcagtttaacttattattttttaaaaatcctcgttagaatcacttggggagtgcttaaaaaatgctaaagcctgggccttatgcctaaagattttgatttaattaacttggtgtgaatctgggcattggtattgttaaaagtttcttataggattccgatgtgaagaaggattgggacttgttccagggaatggaaccataaaggggctttggaggtggtggcatgtaacctcagagctatggtatctaagggctggggctttctggtgggatggattctttttagcctaattactttgcaactttgacagtgatgtaacactttagcagaggaagagattctaacatcagagtttcaaggaatagaatgtccaactggaagaatttggggttgactctggtgtgaggtcatttaaatgctttctgatcaggttgatgctatagtcctgtttctttgatatgatttgctgtggtagatagaaaccaggaaagctagccttgaggaaaatcttcagtttcttttgtggagaggagggaatttttctgtgatatgtgagtcaaccacagaattgtaatctacaccattgtacttgagaaatgtttgaatctcagtgttctattcagtatttcgcccaaatttttagcttaaaaatcatcttctcctgctttttctagcctcagtagaaattcagaacagctgtatttcttaaattaatataccaaaaattgctgtatactataaggaattggttaattcttagttttaagtattgctatttaattttttttttctgaaaaggaactgttaaaaagcttttaaatgtagttaagtataaacgctttttttgttaattgaagagatacataaaataaactgagtatagacttttgtaattttccagtcatgctcttatggttttttttttttaaagcctttgctgagagaactgtcatgtacaaaactgtgttgaattgctgtttgtttttactttcagtttaaaaatccccttattatgctgcttctggcttctgcagtcatcagtgttttaatgcatcagtttgatgatgccgtcagtatcactgtggtaagaaaaaaattacatatttttaatctgttgagtaagtgtataaattgggattggtttttattttggaaaataaattgagaagtgctctcagatttttttcagtgtccaaattctgcttttattttattctttttgttgcgacagtttcttgttgtattgcccaggctagagtgcagtggtatagtcatgactcactgcagccccgaactcctgggctcaagctgttttctgcctcagcatcctgagtagttgggactacaggtgtatgctaacacccccagcaattttaaaatttttttgtaaagacagggtcttgttatgttgcccaggctggtcttaaactcctggcttcaagtgattctcccaccttgacctccccaaagtgtcgaaattacaggtgtgagccactgtgcctggctcaaattctgcttttattatagttacagtaattttgagtaatgttcaaaagtccatgattagcacacatgaaaattctttaactggtaattttcacaaatatgaaattttataattatctgattaaattttaaatttatttcactttgcagttgagaatatattttgactagttgtgaactaaagcctgacatgtgaaattaaaaatattccttatagtgcatgctgtatttacagcatacatttactatatatgattttattctttccagctaggttattctagctttcattgaactgttttctcatctttttccttcttgctccatttcatttttgtataaaaaatttgtagcaagtaaaagcacttatgcttaagaacactgtagatgttattgtagagatgcagctcttgaactattgcttgcagtatcccaggtatccctgagacctgttcaaggggtatgtgaggtcacaaccattttaataatactaaaacattatttgtctttcaattatagacttttggcattaatggcacaaaaacaatggcaggtgaaactgttagagccttagcacaattcagagtaatggcacccaactttgttaacagtcattgttttctttcatgtttcttaagaatgttcttgataaagcagtaaaaattaattttattaaatctggacccttgagtacataccttcataataatttatgtaatgaaatgggaagtatgcatgaaactcttttgtatattgaaatacaatggttgtctcaaggaagggtgatgattgtgaggcaaactagccttgtacttgaaagactgactcatagacaaactatgggtgttaggacttgggtaaccagcagattcttatttttgaaagtgaattaaatgagcgaatcagaccaaggaaaggcaactggcagaatttgttgctaatgataaaattcaggttttcaagcaataattagggttttggaaaatttgtatgcactcttatgggctggatagcatcccagtatttaagactttattccaattagatcagtagtgatttcaacaaatgtgtgttttttttaaaaaaaaaattgttacgaaatgtggtaaccttggggaagatttgggcaatcttggggaagatttgaataaccaagtgaaccaatatttcccagaagaccaatgcgtgacattacaaaatctgaaatggtaaaagatccattcaaatgcaagataggtcaatggatttcgatataatagattatgaaaggtgcattgatacagttttatattctacattgcagattacctttaagtaactagcacttgagttttggtgtagtagctaagaagaatatccacaatcatctgaaaaagctgttaaaatactcctccctaggctgggcatggtggctcatgcctgtaatcccagcactttgggaggctgaggcgggtggatcatgaggtcaggagattgagaccatcctggctaacatggtgaaaccccgtctctactaaaaatacaaaaaaaaaaattagctgggcgtggtggtgggcacctgtagtcccagctactcgggaggctgaggcaggagaatggcgtgaaccccggaggcggagcttgcagtgagctgagatcacgcccctgcacaccagcctgggcaatagagcaagactctgtctcaaaaaaaaaaaaaaaaaaaactcctccctaaaaaaaataaaaaagaaaaaatgctcctcccttttccaccgtatctgtatggggctggattttcttcatacactttagcctgaacaatatgttatagtaaatggaatactagctttctagaaagtcatatattaaaatataaaaatttaaaacactgctatttttctcacaatttttttggaaaatttatttttcataaagttatttgtgttagcatgtaatgaggtttaaaattttttacatgagttgatgagtagaaattaaaactgactagttgaaaaatttgatatggtaaatatcagtatatataacccacttaaaagctggtcctcaatttgtgagagcataaaagggccctgagatcaaaaagttagagaagctgccctggtaatggcaagccactgtaaactgttagcttctttccccacaggccttaaggtaaagttgtgatttcttttccagctgatctcagtgtttaaaatctgttattgtgggactgcagatagttagaaaaataaaatacagttaacagttacttctcaagttaatgtctgatttaaaagcctgtttcttttgtttaggcaatacttatcgttgttacagttgcctttgttcaggtaagtactctattttgccaacatgaaaatggtatgttaattgcttaaaaatcaaggtgtcttgtggtagaacctaccgttattggggggttgtaatgcccatcagaacaacttattctttgtttttcaagtaatttcagatacagacaactcttcagggaagcttgtggtgtgggactaaggaactgctttgatttaggtagtgagatgaagaaaatctagttttttatttgataatgttaaggataactgaagcagatggaaacaaaaagcatagtaatagaaataaaatccagcagtaaacttttttattttttcaattaaaaaattggaccagagtttatagtttcataacactgttatgttttaatgcctactagagctaagtctagatgaaacaaaaaagtatagaattaaaaggtcgatctgtgatgtaccatttgaagaaaattccacaggtttctgtgactgattcccttagccaaatgctacacttgtttgctgaatttatcacttaaccttattttatttgagtctgttttgaggaattaaaatggttctactcattgttggcatgacctcctctcccctccctttaaaacaatttctcattcctccacaaaaggggtgttgtgatctgaatcaaagtaattcaaacagtaaataaaacatatgtaaagtagccccttttaaaaattactatgaataatgtggagatactgtcaagatttctattaataagtacagacaaataaaaatgtaggcttagttttatgtttatttaaatatctgaaacttctgtagattttagaacagtgtttcacaatatcagcagatttcctttttagctagaacatggttaacaagaatagaattattctagcttagagaaaaatgtaatattgttgcataagcctgaagttcgtgctgttttgaatctgaagcctatactttgaataactatggttgttcttacatctacgatttattacgtgggtatttcttgtcactatcccagcctcttaaggtaatctctaacctagttgttattagttctgtagtaacccagtgtagaaagccagttggaatcagatcatttgcagtaggtttgtgagctccattagtagactatcagggttccgcttttaggggaatcttcttgcttagacaaatgttgcccatggtcaggtggagctggttagtctagcataggtcatgtcaggctaaccattattcaaggcagctattcattcagccaagtgagtgatatgacccactggaccactaactggaccttcttgcgtctttaagaatgtgtcagatatgtggagtgccctacttcagaaggattcctgcaaatagtatcactatgtatggaagaccttagtaccttgttctctttgatcactagaaagcccatgttttcaaaaaacaccacaaaattgtgattttaacataagtcaatatggaattttacacaagatagtgttgttatacacattaaatgctatggctgagactattaaatatgtttatgataggtacatttgatagaaatctcacaaaaggatgaaaactttataaaaagcctagtttcaaattgctaggtctgattcttacacacatgtgacccatcaccaaatatgcctgtgaaaccaacaaaatagtctataaacaagtaaaaatcctctccaaaaagatcctatttactgtcagttgaacttatcataatgctttaatcaaaaagctctttatcaaaaatgtataaaaaattcttaatactttatcattatttgttatttgtgctatattacttgtgtcttaagagggctttttatattcctttttatatttatgtcctgccttttttccgtgtgtctttgcaatccccattccccacaccactgtacttcttcccagccataaaaatagctaattgttttatatagtcgtaatgaagtcaccttacaataaatttgaaaaatgacttttaggcatttattaggttttaggtggtatgtttaatgatcattttgatatagaggtatctttataattgtagggagtagaggctaagaaaccagaagacataagtaaagattgggcagcatctatgtcatttattactgggatctaggattgatgggtattttctagcatattacagaatttttgggtaaacttccaaattccttaatatccttcatgtgtttggggtgttgtcttatgatttttacatttgtagattttccttatatttgtcactctaagattaagtagagactgattgtgttctaagttattcttacatagccttgtgttttctatttgaagtttgtgatggataggacattttgactagtactagcactgcagtcatttcaaaacattcccaacccttctacctccactatttgcctctccctcttttgaccttagattagaagattcttttgcttactacagacatgaggcaaaaatagcagtgatgtgtgatgcaagactgctcatggaaatgtggactaagtagtattgtgagttgaaggatgtttctgactgaccctcagctatttgttatctggatggaagaaggctagaaatcacattgttagaactcctgagaattttcctttttggatacacaggttgatgggaactgggtctgtcagtatagagccagccacatcttactccttgtttatcccatgtttgttctaatggtttactttgtaaaccattgctgttagcatgggcttaaattcctaaagcagatgttgtttacggttaattatctttgacttctgtggtcattagacacttaacataagattatctaaattttaaggctcaatgacttaaaacttttaatgactcaaattatgtactctttggacatactagtcagttttcatttttattctaaataaccttaggtttgtacattgaatattaaaatgtaaaactgggaatatttaattatcaaaattgatctctacatttaacattttaaaataagggacaagcttttctgggtaagaatataagcacaagtaaaggaaaagatgagaattgggggaaattttaaaataatgattgagattaataagtctaaatggaatatattcatgggagcaaaattaaattctacttttttttgtttgaataggaatatcgttcagaaaaatctcttgaagaattgagtaaacttgtgccaccagaatgccattggtatgatcctttttttggtatggatttctgcccctttaaaaatagaagttgaatgtgactagtaccgtacatattgttatccccactttgtctgaacataaggaagatactattaatctgacacaaaaagttcctggtctcattaatgtagcaaaactgtaccattgaaaactttaaaatccgagattctagagacatggatgtatttaacagattttttttttttttttttttttttttttagatggagtctggctctgtcacccaggctggagtgcagtggcacaatctcggctcactgcaagctccatctgccgggttcacgccattttcttgcctcagcctcctgagtagctgggactacaggtgcctgccaccacgcccagattatcttttgtattttttagtagagacaggtttcaccatgttagccaggatggtctcgatctcctgacctcgtgatctgcccacctcggcctcccaaagtgttgggattacaggcgtgagccaccgcgcccggctgtatttaacagtgtgtgtgtgtgtgtgtgtgtgtgtgtgtgtgtgtgtgtgtctgtgtgtgtgcgcgcacgcgcgcatgcatgcgcgtgtccatgcgcaagtgtgtgctaagccctgttctgggtatagtgattcacaatcaaacagacccaggtgattcaaaaggttgcttcaatttgcacattttacatttgaacaaataatttgtttttcaagttattttctgtcatcttggcatcttaagtgtttagaaacagtctttttcttggttcttatatttgccttttcctcagacaagcctactggaaataattttttaagacaagttgcatgaattttttttttttaaccatggttgtttctatttcgtgttacagtgtgcgtgaaggaaaattggagcatacacttgcccgagacttggttccaggtgatacagtttgcctttctgttggggatagagttcctgctgacttacgcttgtttgaggtaaatttgggatctgattgtaataagtgaaaatacgtggatgtagattaaaggataaacattactagttttaaggaattaacacatagttgatttgaaccatttggtattctactttaaaatgtgacatatataaacttttttttttccttaaaatgtatctgtctctactgtaacatcttttgaggtgtttgtttagtgaatcagcagatctttatagaaacctgcatattagggactgtgggagatacaaagatgatatgacagaatacttgtgactagggaacatactatgtgtacacaaattactcaccataaaatagaactcagtaattgagtaagagaagttcaaagaataggatatagacatttaaagaagggagaggttccacctgatttgaatgagatcagaatatgcctcagaccacatggctttggcagtgataattgaagagtagtactggacaaagatggggaagacaatgaagcaacaccattcaaatcactatgaacattccagtgtatgaaactctgttgggacatggtaagggtagaaaacgtgtgatggaatcagatttcagaggccttggatactaggcttaacttcagatttttttggttaggagttaccttttgaggctcctgtgcagttgctaaataatgttatccttaatctggctacagtgtgtagaatagattgaagaactggaaaatggagataggcacctagtttaacaggctttcaaaacccattagtatgcaggtcttatccaccattggaattaagctgtttgttaacacctgcagagcagtcagtctttaaatactatggccaaaagtatgagtgttctcatagatgctgtagaaggcctgaaaaacctttcagactgtaataagaacaaacttggcttaatctttcagcagaggccttttttccaaatatttgaaatttatccttagaaagctactggattgctttaattgggtgactaggaataattgataatattgcaagtgttactaattttacttcattatcctttttctcgtctttgaggtctttttaatgttaattcttttctactcttctttccttcagttcctaatattttgccgatgacaataccttgaattattcttcctcagagattaagtagtcttgtcacttggcataagttttcttccccctcccccagaaaaccctaatttaaattcatggagttcatgccattctttattctgggctgctgctcttccagttgagaagcagaacttctcattgggatagttagaagatggtgtttctcatttgcatggttcgagaaatataatgatagaaacttcaaaacaccattaatgcttgctaaactattttagggttttcatttaactaagggttaattgacttgacagttaattatttcaaagttcacatgtaaacaggaaagaaaacctgtcagtatagattagtatgtattttatctactcagcaaatatatattgaaaacattgtgaattttttatttttgtttttgagatggagtctcactctgttgcccaggctggagtgcagtggtgcgatctcagctcactgcagtctccatctcctgggttcaagcaattctcctgcctcaggctcccaatagctgagattacaggtgcctgccaccacgcctggctaattttttagtatttttagtagagacggggtttggctgtgttggccaggctggttttgaactcctgacctcaggtgatccacctgcctcagcctcctaaagtgctgggattatagtcgtgagccaccgctcctggccgacattgtgaatttaataagaattataagcatatgtcttgtggagtaatttattagttattattgttttccccctacttgttaactttgcaagcacttcatcagcacgttttattctgcagtactgtagttaggttgattttgttctagttaatccacttttacgtatatagttgaacattttttattctctctaccttaattctgccttatttgttttgcctgttacttgctaccccaaacagacttttgcaactactttgactgcagattgaaataactttccttaaagagttggggatcttttatccatctaaatttaaatgtactgacttaggatatagactgataaagtcagtttctcttctggacacagaagctgctagttttttgaaagtaaattggcttattggagttttgttggctcagtttggctgtggtgatctttggataattttgtaaggctagctggtcatttgatactactgtatgaaataaactgtcattagggtttaaaggaaccagaaaactccttagtcagctttgggatatcactaatttcttccaaagcacatagatttcactttagagaaagcaagtctgtgaacttctgctatgtagttagttctcttacagactaggcctaaagccacagttgcaactttagtgtcatcattttgtaactgtcataaattttagtgctttcagagtttgactgtaaacttgcctgggtccttagcagcttcttgttagcacattcagtgacttgactgttgtacaacttttatctggtacaacttttatcttcataggttgtgtcttagcttgggttgctttaacaaaataccatgccatttatttttcacagttacggaggctggaagttcaaggtcaaggtctggcagggtttggtttctggtgaggactgttgctagcttgagatggctatcttcttgcagagtcctcacatggcggagacagcaatttctctctcttcctcttatacggccactaatggcatcattaggactagcctcatgaccgcatctaaccctgattacttcccagggccccatctccaaatactataacattgactgtagagctatatagcatgtgactttttgggatacatagttaagactgtaacaggttgagactgccattttgtttatactttttaaagactaatattaataacttaaggaattgtgtagtttttcccttgcctgtgtcaggttttcagaagccagtggttgagccaagatagttttcccttggtatccactgaggatcggtcctagtagatccacagagagcaaaatccaaagatgctcaagtcctttacatacaattgagtagtatttatatataacctctgcacatttttctgtatactttaattcatctctagattacttataactcctaataaaatataaatgctatgtcaacagttgttatactatatttttaaaagttcgtattttttttactgttgtattttttttattatactttctttgaatattttccacctgtgattgcttgaatccactgctacagagggaggactatagttggtggcagtggcctttccagcaggagcctgagaggcactgatggagctaggacagtaaaacttagaggaattgagctttgggcatgttatttgtttttttttcccccgagggtttttattttaacttttagtgttgagaagaggcaccactggccaattacttgatgataaccaatggattggtcggacaatgactttagatgaagcaatcttattgactatgtatgcctggataacagtacattttatttttatttttatttcatttatttattttttattattatactttgttttagggtacatgtgcacaacatgcaggtttgttacatatgtatacaagtgccatgttggtgtgcagcacccattaacttgtcatttacattagataatatctcctaatgctgtccctcccccctccccccaccccacgacaggccccggtgtgtgatgtttccaaccccgtgtccaagtgttctcattgttcaattcccacgtatgagtgagaacatgtggtgtttggttttgggtccttgtgatagtttgctcagaatgatggtttccagcttcatccatgtccctacaaaggacaagaactcatccttttttatggcttcatagtattccctgctgtatatgtgccacattttcttaatccagtctatcattgaacagtatgttttgcctttgtgaaaacacagcatatttttggtgttgttccaggtaaagtctatatcaatatttggataaagaactctttgtaagaaaaaacagcgtgagggtcagatggaaaaaggttgtgggtttttttttttttttggtcttttgaaaatattttacttctctcagctataactttctaagccgaataatacatcgcttgaaatgatagcaagattttctttcatttgaagttctgaataagtccattgacactttgctttgtggttcatgtgcttatagttggcccccatcatttttttaaacctatttttgatctgatgattttctaaatgtatcagacttctttcagagaattaccacttgggctagcaaccaagattaagctgtttttatgatactggattatcagaccattttaatctgggcagaaaggttagttctattaggagttagggtctaactggggccaagctcaggaattcaaacttaagaacacgccagtgggcattatattgtgagccattttttaatctcatgaatccttgtactttgttatagtatagcagtttggctcagtgagtagtttctggtgttttcagggcttgttcctttctgttccctagttctaaggagaagtaaaaaccaaagataatgggcatcattgagccagcacagatatactttagctacctgccacctgaaggagtcagaaataatctccttgactggaaccccatgtagccattatgttcctatctgtgaggctcacattcttgcccagtctgttgttaagacccgctaacaagcagcttcctccacgttgggtaaatccattactggagcaatcactctgtgtcaagcattctgatttcctgagttaataaaatacatgttccatttactcaatgaaaaaatactctggtaaaacccaggttacaattctgatttggtttggtatgctttttcaaaaaagaatgttttcaaatatttgataaaatgtaagcatgtagtgatattttaaatttacttatgttggtaatgaagctaatttaggcaattgtaatccatttcttaggaaatcagtctgttatgaaaccattttcgccatttagcacatatttgaaaaccatgtacagcacattgtatcaggcttcagggcttagaagtgaaaaagacagtttgagccctctccattggcagacaccagcttgcaaacaactgtgattcaaagaatgatatgtgtctgctcatgaaatgaattgaccatgtgagcctaggcaagccgcttgattttttcaggcctgttttgtcactgtgacacagagttgccctagagcaatgcattccaacttctaatgtgcctaggaatcagctgggctctgttttggtaggtgtagggtggggcctgagattacgcatacttaaccagctcttagaccatgccaaaagcactggtccatccaccacattaaaaaaaaaaattattaaaacagcttttttgagatataatgtgcatatcatacagttcacacatttaaggtgtatcgttcagtggttttcagtatattcacagttgtacacccatcactacagtctaattatagagcattttcatcactctcaaaggaaaacccttacctcttagcattcattctgtattttccctgcctctagcagccactaatctgcttgccactgaaatacatgtgcctattctggacatttcatataagtagaatcatacaatatgtagtcttttatgtctggcctctttcatttaatgtaatgtttttaggtacttcattcatgtatgtcattgttttttactgccaaataattttccattgtaaggatttatatcacatagttggtgaatttaatccatttacacttacagtgattactgataggaaaggacttctgttgttacttgttttctatttgtgttatctttttatgttcctcagtttctcctttgtgcccttctttgttttttttccacgcccctccaattgattttttttgatgtaccttttttattccctcaaattattttctgtgcatactgtttacttattttcttagtgattatatgtggattacaatgaacatcctaatcttataacaatctatttgaagtgatactaactttgcttcagtagcatacaaaatcgtacagcccacacctccctcatctttgttatttttgcaaatgacatctttatgcattctgtgcccattaatatagatttataagcattttatgcatttataagtttaattatataggaagcaaacacaggagtcacgaactcaacatacaataatactgacttttatgtttacctacatagttagcttcattggaattctttatgtcttcatatggctttgagttactttctactttcttatttcagcctaaagggctgtctcttagcatttcttatgagtcaggtctgactagtgatgaactctttttgcttttgtttatttaggattttaaaaatttctccttcatttttaaaagataatgttgccagatagaaaattattggttgacagttttttttttctgaatattataaatgtctgctctttttggcctctgtggtttctgattaggattattaatcttaatgaaaattctgttatgtgataagttgtttctgtggctgttttcaagattctgtctttatctttcaatggtttgattataatgtgtttaattgtggatatctttgagtttattatatttggatttcattgagctccttggttgtgtagatttatgtctttcatcaagttggggaagttttcagccattttatcttcagctattctttctgtcgccttctcttttttccttctgagattgtactggcatacctcattttatcatgcttcaaagataatgcatttaaaaaaatatattaatagatttgtggcaaccctgtgtcaggcaagtctgttggcaccatttttccaacagcatggtgcttactttgtatctctgtgtcacattttggtaattctcacagtatttcgaactttttcaatattatgtctattatggtgatctgtgatcagtgatctttgctgttactgttaaaattgttttggggcatcattaacgatgttcatgtaagactataaatgtaatgagtaaatgttgcgtgttttctactgctgctctgcccgactgctctttccttctccttgggctttcctgttctctgagaaacagcaatatggaaattaagccaattaataaccctacagtggcctcttaagtgttcaagtgaaaggaaaaattgcatgtctttcactttaagtcaaaagctagaaatgattaagcttactgaggaatgcatgtcaaaagctaagataggctgaaggctaggcctcttgcctcaaacaattagccaagttgtgaatgcaaagaaaaaattcttgaaattaaaagtgctattccagtgaacacacaaatgataagaagtaaaacattcttattgtggatatgaagaaagtttgaaaggtttcgataaaacataaaagcagccacaatatttccttaaaccaaacctaatccagagcaggaccctaactctcttcagttctgtgaaggccgagagaagtgaggaagctgccaaagaaaagtttgaagcttgcagagattggttcgtgaggtttaagaaaagaagccatctctgtaacatataagtgcaagatgaagcagcagatgttgatggagaagctgcagcaagttattcagaagatgtagctaagatcattgaggaaggtggttgtaccgaacattttcaatgtagatgaaacagctgtatcttctgaataactttctgtatactcgaatcagaaagttagcaatttatgtaagcatctaccacgggataaaattaatttcatatatcgttttcagtaatacgtaacataacacttggttggtttggctttgagtgttagtaagttaaatacatgaagattttaaattacatttttcttcatttgcataaacagtgaggtatgttaatttttgagaacagaagtaagaaattttatcatgatcaggcagctacaggtgaatattttggaagattgttttctggggagagaaatccatttctaatctgcattttaatgatttgcttttaattctagactcgagaggtgattgccttatcagtgtaccgtatgtcaaaccgttctttagcttaagaacttatttgtagctgccagttgttccatattaacctgaatttttaaaagtactttctgcctttcaggaaacctttgtgactggcatttgatttctttctctctagtgttttatgggaataataatcttgtgaattttccaatcatttttattgtgtacatgttaaatatttagactgtggattatatagtcgtcttgattcttatttatattctgatttttgaactgttttatagcatattcacacctccaccagactgcttgaagaagaatgaaagtgaaaatcagttttcttgttcattaacaggtcttctgagggtttaatacttaaacttctggctggctgtcatggggctgcctgattctttgatttcactttatcctacctttccctctctcatgaatgcaatgaataatgactctaatatctttcttctcagacgaattaaattgtgactttattaaactgtaataggcttgcctaatttattaaattccaccttttctttccctctactccctcaaaactacttcctaggaaaactcttgcaatcactattaagagaaaataacttgtgacttagaaagtattcgtattcaacagatagttgaaatctttgcagattgggacattgtaagatttagacaaatttcatgatcatttgagttttagttgcaaatttataatgatataggaaaaaattagggtcctgagctcctttttcttccacatcagcttgtctgttccaccagacaagggctctcttaagtgattgttgttctgaggctgaaaccaaagagctaggttgctgacagagccatgaaatcatgcttttctctttttaaaaacaacagattaaaaaaaaaaattccttctctgttagtcacttcatgttagtatttatccatgtttaagatttacatttaaagcaaaagtcttcaaagggaaaacatgagttttacttctcttacagaaggaattctgtaaatttctacaagtatttttaaatattagtgggtctctttcctaattaagatcttggaaagttacgtgcaactctgactgttgtaacaagcattaaatatgagcttgctaaataaaatgaaccttatataaatttacttgtaattcagataatacataattttttacatatctttgctttatgtgttatactgtctttttctataagtggttacaaaattggggaggagaaataatttgcagattgatcctctaaataattaagaggaatctggagttaaagtctttcaacactggaattttatctgcatagtgttgtacctctataacgttggatgagttacttaacctttcagtgcctgtaaaacagataataatagtaattacttgcctcataggagttgttagtaggattaaatgtgataatttagcatagatatgtagcatagtgcctagcagatggtaagcaatgaaatgtcagctgatttttagtattggcattatctttgaagaagggcccattttaagatttgtttctcttaccttgctaataaatgtgttagtgtgaaaagttaaatagttccaaggttaacgtggaaataaaagtcaaataaatatgtttctttaataaagaaaaattcacttgcctttgaacatgacaggtgttttttaaatcttcagttgcgttaaggtaatgaactcagatttattaactggtttgtgtttgtatacacaattaatgttaaatgcaaaatcctttaaagtctaaatgactattgatctgtattttaaagaataatttttgtaagcttattttgatactaaaatgcattccactgtcatattatctaaacttctgggaaatgctagcacaattttgtctctttggagttatatttattttcatgatgaatattttaaaacttaacaacctattgtaaactgttatttttgcagttatgtttgcctaacacacaaacacaccaagcatgttcctgtccccaaggtctttgtactttttgttgcctttacatgaaatccactctccctaattatggcccagccttggagctctcaggtctgtcagggctctgcagaggattacctggttttggggaatgttttcttctaaaatgtggctctatctttattatgtttgttgttttccctctacctggcattatgttatatactcgtgcttgtttaaaatcactttcccattaatatccaagggtagaaactttgtttcattcactgctgattatcctactgtgtatgataaagcacagggcctggcacattgtaagcagtaataaatatttgttaagtgaatgtaggaatgttgttgatcaaattaaaacagttttgttgaggagatgaagattctgtgaaccaatttttaataatcattttacgtgaggttatttgaggtttttatgctcagaagtgaaccatttgaaaagatgtaatttataacttttcaccccccaccaaaagaaaagaaaaagaagatttaaatttagaatacttggtacatagtgtgaactgagagttaagaaaggcctgattgagaatactgactcagcctaaaatatcagtgatactgtgcagtaatttatcctgttttcttaccaggagcttgctcagtgcctaacactgatagtcagtaaatgtttgttgggtgaatgaatgagcctgtaaaatcagtaaagtcatgaactaattcctagtttcttacagagtatcctaaggacccttgaataaatgcttctggaataaaatggatggaaatttgcaacagaatcacctggagggcttgtaaatactgtctgttaggtttactttttccaccctgtgtttgaggtggagcaaaggactcttaacttctaacaagttctgaggtagtggatgtgatgctgtcctcctttcagaagctttgctgtatatctgtattcctgttgaggtgattcatgttaatgtattgaaggttttgagagcactgcagtagaggaagctgtttaactcttaactatttctgacttacttggccctagtcctctccctcacttgttcgtatgtatgtatgtatgtatgtatgtatgtatgtatgtatatatgtatgtatgtgtgtatgtatctatactcataaaattgttttttttttcttttttctgtatgcttgggtaggtaaatactgtgtcaggagtgaagccttcaaaactgagccctgttgcagagttggaagatattatgatagttatgatctgcatgaaagcatttgtatacatttttgagtcttgcaaattgtaatttggaataaacggcatgtataacaataatgattttatgaaaattgattccaaaatgatgaaatgatttctaagtaacatttttcccctttattcatttatcactttcagtcatcgtcgatggttttaatctgccaagccatatttccagaactttaggtacttgacaaaattaggaaataatattttgtcatgaaaagttgagttttctctagatgaagattgagtcttagctagtgtcaaatttttcctagttgtattttcaattttaggctaatctagtctcatggtacagcattctactttgcatgtcttagattttgttgacttaattgtattttaaaatatgattgtactgattctggtcttttagagtgatggttttgatacaagatgtggctaatcaatggaaaagggatgtttgaggaagaagtgatgatggttatgaactctagagatgttaaatgtagcacaaaatttgaatctgggattctttatgttccctaaggctgtggatctttccattgatgagtccagcttgacaggtgagacaacgccttgttctaaggtgacagctcctcagccagctgcaactaatggagatcttgcatcgagaagtaacattgcctttatgggaacactggtcagatgtggcaaagcaaaggtaaatttttttcctgatttgaaaaaagcagttcctttgtttgaaactattttctcaattattttttgctgattttatgtggaatttttcaaatacatgacaaaggataaaattgaacttaacccattacatctatttgtgaaactggggagaatctgtgtccccaaagtataatatttccgtagttctgctatttcccagataatggataatcctcaatacctgtttctttttaaagagagaaacagtgttttcatggatgtgtttattattaaataaattttaatttagttaatatgatactggctataataatctgactatatgttgttcacctgttgatcgatttcaaatgcttcctttcctgaattctgatactccaccagtgcaaaagacaccattcactaggggtaaaaagaaactatattaaatgtctcctattgagtataatacatgtttgtatttcagaaatactaatataggcaaaaaataggcctcagaattgagtctgctatacgtttttttttgagacggagtctcactttgtcgtccaggctggagtgcagtggcgtgatcttggctcactacaaccttcaccttccaggttcaagtgattctcctgcctcagcctcctgtgtagtagggattacaggcatgtcccaccatgcctggctaattttttgtatttttagtagagatggcatttcaccatgtgggccaggctgatctcgaactcctgacctcaagtgatccacccgcctcggccacccaaagtactggcattataggcgtgagccacagcacccggccagcaatacgtttaatgtaatgtttgtttccagagtttaaatcataaggggcaaatgctaatgacaggaacataaaaaagtaaatttgctgaggaaatcttaggagtgtgtatgttagacatcttcactgtaggtaagactttgaaagttgttggatgtgtgtgtgtatgtgttttggtttacatttcatctggatgtaaatgtattttcctgtttttccccttagggtgttgtcattggaacaggagaaaattctgaatttggggaggtttttaaaatgatgcaagcagaagaggtgagtacttaatatgttaatgatgtatttgttccaaatctgaaattcttcattgtaagtagagaatgttggattattttatatactattgagagcaatattttattcagaatggaaatcagttgtctctgtttagaaacataattggaaagcctgtaattgaaaaggtctaaattgatgttgttagtattctaaaggattttgagctttactcattgtttatagcagaaaaaggcttatagccacttatttgtagatcttattattttcagaaattagtgttgtggtaattttaaggattagtaattagtatatttgtaccttggaatatgtcttctatcaaattttttcaacttcacataattccaagtaagggtggcagggaaaagattgccaagtaaaataacctacaagatattctcggctaaaagtattaaagatgagttcattttaaatactttcttattataaaaagaagcttcattctgcaaatgtcgtgttctccccaaatcctctggatttctcaggtaacctgccaaaactccagtatgcgatgcaaagtgggaactcattccaagaggcgtggcagtgaagggatgaatagagaagagggttagcagttgagggaggattaaaagacctgggttactagcatgtttgtggataccaaaagggaaaaattggaaaagcaagtgagagagcagctgatggtaatgaagtcctgcagtggttggtaggagggagaacagatttttcctcaaaaggaagcatagagagaacggaccttttcaaataataaacaggtttttaaaaatagagaatttctgttcctcactgtgtgaccttgggcattgtgtaaaatctaagtctcagttttctcagtgaaggtgattatttaccttatgggagagttgtatggttaacttaggaattgctttgtcaagcacttagcaagcccctggcacttgataaagcttagtaaatatagctaattgtggtgacactcttcttcaatttatcaaggcaccaaaaacccctctgcagaagagcatggacctcttaggaaaacaactttccttttactcctttggtataataggtaagagaagagtgagtatgtatatatttttatttgagttttgttttttgaatgtgaagggtggtggtattctagttttatttattggcttttcttttttttattaagtttaatactttttaaaattataagactactagtagccattgttcatttcaacaaagaaaaaatagaactctgattcttgtaatcagaaaatatttcttgaaacattttagtatttgtctttctagtcttcaacaagaatgtaatacgatagttttatggactgcttttctatttttatttcacatatcctgtcataaaactcttgtcattaaattgatggtcacataaaacaaacataaaggttgtatagttttctattttgtgggaaaacatataagaagacctcttctagacatttaggattttttgagggtttttttttggtcatataaatacttctttagtgtggtgtcttctggtaaatacctctcttttttaaggaaaaattcttagaaataaaattatttagtcaaaggggatccatgtaacttttaaatttttggccagctttaagtattgtcattaacttcaactgtaaataaaagagttctcattatttgatttcacagttcattattagggaaaccgaatgctttgtcatgtgtgggttgatcatttttatttcattttatgacctgccaacgatttcttttgtcccttttcttgtgtcttgagtcttagattgataaaagctttttatatgactagattatcaatctttttgttgtataagtttttttttcccgtttaagttgcctttgaggcatgtggaataaacttggtaagaggacaatatatgtaattaaccatttatgcctagtgttccattattggaatgctaagcatgtgggacttatttatatcctactgctcaaggtcattgccaaggtctggttgcaaaaattcaaaaaattgcaacctcagacacaaatgggttaaaacatccccttttccttgagattctgttatcaccctcctattgataatctctgcaattaagttggttttgttctgttcctaaagattttcccaacctcatgtttataagaacatttattaaaacattgttgtatagttttttatttttgacattttactattttatttaaaatttattttagtacatggcttaaggcagagttttaacttttttactcaagttaattatcccattaattctgtaatccagtctttattcattggattgaagtcacgtttttatcacacattaagcacttgcattaattttggagtcttttctcctttaattttcttaccgtgttaattattccagctagtttagtatttcaaagtcagtaatacaatttttttatttgagatggagtctcattcttgttgctcaggctgaagtgcaatggcgcaatcccggctgactgtaacctccacctcctggggttcaagtgatttccctgcctcagcctcccgagtagctgggattacaggtgtgcaccaccacacctggctaatttttttattgtatttttaatagggacgggattttaccacattggccaggctggtctcaaactcctgaactcatgtgattgcccacctcagcctcccaaagtgcagggattacaggactaatgcaattttaaagcaatatttctgttaatacaatattagttgaaataactttgtaaatagtaattctgtttatccatctatcttcattgtaaacataaagtagaaggtaggaagttatcttagttatttttgttttactggtgtgtatgccctcataacttcttccgtttgattattgctcattttctagaaattttatagtgaatttgatagatcgaatgacattctagccaattaaatctttgtagtttctattagcactataccataaaccatttcaaatttagtaataaatatgtttcaactttacgatctctggttatatgttagtatattacattggacataatttttcttgccaaggtcaagagctagatcaggggtcagcaattgtttttttttgttttttgtaaagaactagatagtaaatattttagtccatatggtctctgttggaaatactttactttgccattagcatgaaagcaatcatagaaaatatgtaaataaatgagtgtggctatgttccaacaaatttcatttacctaagcagacaggagacccacagattatagtttgctgacccctggtataatcctttggacataatttctttcatcatgatagtatttgggataggatcttagaaggttgctatttggataattattctttagttatataaagatgaaaaaaaaaacttgtcttaaatgttcatattgatttgcagtcttgagatagcttattttatcaaacctctcgtgaatctgtttgctttttcctcacaaacctgcttgtgcgcccctttccccctattcttttcaaagataaaaggttaaagcaaggagtattggtttaattgatttttaaatttttgaaatgccataaaagtagtgatttttagatgttaatgcagttgtaggtgcttaacgtaaggcacatcactttttgagccaagtcgtaagtgtccctttgtgtgtagtatggatttgctgagaagtgtctggatattgtgttatggaaaataaagttttagggtttaattttgcatatttgatattaaatagaagacctatatgtttgctgccaccttctttttttcattgtatgaacatactggtaatttttaaaaaaataataaaatattactgctttaagggatggtaggagcagtgtcaaccaaaagtaaaactgtgtgtgtgtgtgcatgtgtggtgtgtgtgtgcacacatgtacgtatgtgagtatgcacagcattcacattaagcagtgttaactttaacctcccctgtttaatggatttttataaaatcttctaattgtgatctgatatgctttcccttttttgtcaagggacgttttagattccttcagcttgttctgttccttctaggtgattgtatgtaaaagggaaaaataactatttaattatctttcaggaatcatcatgttggttggctggttactgggaaaagatatcctggaaatgtttactattagtgtaaggtaagtctcaatactttataattggagtctcttttgcctcttttatttctctaatggacatagcttacgttttattatggagatcagtattacatggagcccataagagtataacatcgctacataaatagttcagaagtcatatattaaaattatccttagaaaaatgaaaatgtatgtatatggtaatgaagaaaacccatactagatgtctggaattactaatgcattattgcctttttatatataaatatacaattaaggattgtcaaattgaaaactagcaacatgaaagagaaagttcacaatatagaaattgaataatcaatttcagaggaaaacgaaacattgaagaaatgatgacaaatttaaaaaccaagtgtttgtattttcagagacttgtgaagaaactgcatccatgagataaattgttgtagaaaaggatcagagaacaaaaagagtttttagaaattaagattatgattgttgaaattaaaaattcaattgtaggggtgtaatataaattcaaagaggtctccccccaaaaagagtaaaaagtcttagaatgagataaaatgatgaagaggaataatttcaggaaataccacttgtaactaattggagtttcaaaaattacataagatatgacacacaagtattttctcaagctaaggcaaaaagtaagtctttatagattgaaaggattcactaaataccaagcagaatggaaaaaacttcaaccttgatacataattgtgaaactaaagaagaaaagtcaggtcatctacaaaggaagggtaactacgctggcatcagacttctcattagcaactgcagtttctaccacaggatctttttgggttcttctaaacattccaactcacaagactttcacagaccacatctgatacctgtgccctgaacacagcagggtaacttcaggcagccttctcctgagagtccgcagcagtccatgtagcaattcactcaagtacaaggagataaggtcaaccttgtgagtgtgggatctaccttgggttaaaatatctcgtgttctatgagagacgtattttgaaacatgcatttccagatgcctgcaaaggacatgtctagttacaagttactacacttgagaaactcaaagctatgatttcctataagataattataactttcctagtccagagagattttattagtcaggggatcccttaatcatagcagtgttatctagcagcatacttgacatattattcttaccaggtcactaggtgaacagaactagagttaatcaaatccagaaggggaagattattttattaactgttcatccacagcaacatcagattgcattagaataagtggagccgtggtaacaaattaggggggcaattgatcataaatctgtaaattgggcctagccaaaggattggtccaattagtgacaaataggtaggcaagtactcagaacattcatttcctacccatccttatatgaattccagcaaaacaagggtgaaagaaaggaagatgataatagacataagaaagggcaagaacttacttaggcatctaagaaaaagaaatcctggtagacctctgttgtaggcatatgaaatatttcaaatattagaacaaaagtcaatgtctttcaaaaagaaaagtcaaatagattacaaggaatcagaatgaataagaagtaaaaagatatttgtgatatagtgaaagaatgtgtttttttttttctcaagggagggggtgaaaatgcaatttgaaactcttggtttaaatttgtgtttaaaaacgccatgggttaaatataaaatacatttaaaatggggaataagtttgagatattaaacattgacatattatccattggatcatttttagtttttgaggatttgggtttttttttttttgagttctgtttgtacagattgacatatcataacttctgttctttcttcaaggtcttccaaaggacaagatacttaaaaattttcaaatagaataaaactcattctattttgcaattctgttttgcagtatggatccattggaatcttttataagtataagctacattatgggacctttaatgatcctatttttcctctttcttgaagtattttacaatttcttcaccctaggaattattttaacaattatttgcaagagtgctgaagatgactaaaacaataagaaagcagaaaaatgatggaatcattgagaaggttgatgtaataataaagtaaataatcactattctcttattctttagttttcttattgtgttgcctaaagtattgcatcatttaagaaggtgtaaaagaagtctaaaggcacaatctttaggtttgtttgttacagctttcattgaacaaaaatgagaattcagaatttttcactttctactataatggcaaagagaataattgacagagaagacttttcacaattattagacaaatcagaagatcagtgcaaagagccaaatagaagcactgtaggccgtaatgatgtgggtgaaattaataatataagtgaaatctcaagactgagtctttggatgatgatactctagatcttctcaaacaccttaattttgatgagtgagcaatctgtttttaaggacaaaaaagaaacaggtattctcttccagttaatcattctgcagcaaggactctatcatgtagtagttttcagcaagaatctggaccatctcttttagctaaacgaatgcatgaccctatttcattcatcttttatgatgcttgtttatcagcattgacttcatactgcttttaagtggagaaatgctgaaggctggtatgaatataaaagtgattaaaaggaaatagattatgcagaagtagaaaaattcattggattcatcattgtaattggtgtttataaatctaaaattgaaaatgttttgcagtcatggaccaaagaagataactgttctcttttcaacacaattgggagccatcagtggttttagaagtgttgcaatttgacagaacaaatgcaagaaagaagaactagattaataagctagcgcctgttagaaatattttttgaaatctgaaatcaatatttataagataaatatgttccaagttcaccaaaagcagtagatgagcagttagttgcatccaaaagatgttacccatttcaggtatagatgccttcaagtccaggaatagttttgggttatcattaaaatgaaaatttagagtgaagtttttttacaatttaattattcctctgcaaagttttgctaagatgacttaaatataaaagattgaaaagattcgttgtatctagattgtaagtgataatgcctgtttttccttaatggaagcattaaaaaaaaaaaaaaaaagaaaagaaaaaagaaaaaaaaggattccatttgaactaggaacattctctttgagtagcccaaaggagaaaaggaagtattaatgataatacatatttcttgactcttcagtgtgtattgtttagccaataatgttgttgcttatgtgctttcaactttaaaatcaaccagtaaataaagcatgaaaaagtcaattacggttatagaaaaggatgctaatgtactagattatgcaaagaaaaagttggtaatggaaattaggaagtagaagcagcagagggaacagtggtagaatgaagggttaaattgcttatgtccttatttctagcagatcaagaaatagtatttggaatggcacaaagaaagacttgttattttttaattataaaaggcgagtgaaataattctttaaactgtgataaaatacgcatattataaaatttacagttttaaagagttaatttggtggagttaagtatggtcgcaatgttttacaactgttaaccgctatctagattcagaaccttttcatcatgccagaagaaaaccctgtacacattaagcagtcactccccagttttcctcttcccctagtccctggcaaccactcactaatctgctatctctatggatttgcctattctagatatttcatataaatgaaatgatataatatgggaccttttgtatctgtcttttttcacttagcataatgttttcaaggtttattcatgttgtagcatgtgttagtacttcattcctttttgtggctaaagtaatactccattgcatggatgtcacaattttacatttatcagttgatgaatatttggcctgtttccatcttttggctatcgtgaatagtgttgccgtgaacattcatgtatgagtttttgtttgaacatttgtagttatctgtattttatagatgaggacagtaaactacagagctagattagtaagtagcccaggatcacacaagtaagagatggtgaagccagggatacaaatccaggcaatttgatgtcagaacctacattttttaaccactgtgcttaacctggcagctactaggtatccagtaaatgttaactttctcttccttttgagaagtttattttttaggtattgactatattaattttgcgttttattaagctttaagtaacatccaatttaaattttgctgtgagtgctgtttaacctacattttaatactttgtatatgttggttatagtttggctgtagcagcaattcctgaaggtctccccattgtggtcacagtgacgctagctcttggtgttatgagaatggtgaagaaaagggccattgtgaaaaagctgcctattgttgaaactctgggtaagtctgtgttaagagcattcttatgcaatgatgcgtaagtttatgtcaatagtgaatcatctcagagttttacagtttttatcttagagatttgcataatgatgtttggcttatggcaaaattggatatggttttaacaaccaaaaaaggcaattaaaaattcctatcccttaggtgaggggacttgaagagaaatctttctacatcatgttctaatgcacaaatcatgttaagaaaatccatacaacaactgaaatcttggagtaaaattaatagaatttttttcttgtgacatgtcaaagaagataatgtattattacagatcccaaatgtcatacttgagttgaatttgcctgtaagaacagtaaatttacagtagttatattgctgtaacaaaactttatgtgcaatatgctttgaaactccaaaaatgtactgaatttaatttctagtttgtattttaatatcttctccatatatgagaagctgaaataccttgaaaaatcctgattgaagaaattatacgggtttatatttagaaactctccaaactttctagaaaagatgttatataagatcattacataaagctaatgtgaagtagctttgtagaaactaactgtatataaataagaacatgtcatcatctaatttttatttttaatttcagaaactgtaccttatgctgaaacaagcataatgagagaagttaatctaaaattaacaatgagtttgatttctataaaattcagagaagtaggacaggattctagtctttgatttgttttttaagtgaacctatatttctccttgattcttttggtgacttgtaatgatttaattctttaggctgctgtaatgtgatttgttcagataaaactggaacactgacgaagaatgaaatgactgttactcacatatttacttcagatggtctgcatgctgaggtactctataggtttttaaaaacaaacaaaaacagtatccctttaagaaacttggtgtttaacattcctaacagttccagtgtcttaccttcaaaagggctgtaaattagtagtggagttattttctctctctgtgattttaccaagtctttgtctcattccacttgtacacttgttcaatccaaaaactttgattcctccttgacatctctctttcagtcaccccttcatctatccataatcaaatcctaccaattttgacttcctaaagaattttcccagccatctactttatagccagcttctttaagttaccgccatttctcacctgccattctgataaagctttttgactggtctttttccattcttgatgccctcactccataagcagtttgagggatctttttagaaccaaattttaagcatgtcactccataaattaaggtactccaatggttttccattgtgatcaggatcctgaactgtggcgtctcaaagccgtacatgttctgtcccttattttctcctctacccttatatgctaccctttgctttctgtgcaccaagtatactggctttatagttctttcgatgtgacacaattattcctactttaagaactttgctgcctttgtcactgtttaggatagtctaatgcctcttcatcctttgcaccttaattccaacccacttcttcagaacacccagaagtggccctatgttatatgttgtcttagcatttcatacctcttagtccttatcttaggtaaaattttctgtcccttttccccattataagagagcaggagctatattgcctagcacacagcctgcttcatagtaataaatactcgataaatgaatgaatgaatgaatcactttattttaacaattatatattgatacattgtctcttaagtgcacatcactgtgcagtagttcttcctgaaggtgcttatggacaggtctaatcctactcagtctatgcaggatttctgactggaatgctcttaacactacttatgttgggtacagtgatttaaaatgtatttatagctaattcattgagaaaaataagcagtaggcaaattgacagaagttgtacttgggtttatttacgtccattttacataggttttgaaaagagactcttgatatttacggtgttagatctggtcaaagatcccccatgctgtgttggtgaatgtgccctttctggatgattcagaagggtcattgggattacatgtgcttatatgatccaggtatggaaggtagaatattagtttttcttttgttttaaggtcatgctatatgtaatgcattaactatttgttaattgttttatctctcaattaatgtcattaaacattttttatttatttttatttttaatagagatggatcttgctttgttgcccaggctggtcttgaactcctgggctaaagtgattctcctgtcccagcctcccaagtgttaggattacagatgtgagccaccacacctggccactaaattgtatgatttttattgtgaaatttcttttcgtttggcttggtttgttctagacatatgatataaatacctggtttgtctctacctctgatttttaaaattggtgtgtaatatgctgtgttaaagtgatttgtaagtgctagcatatatctcaatgtctccaggcctgcatgtttgcaaaaagaatactgcttttgtctaagtcacagctttgtgttgtatgttacatatggtaatgcatttgagttctttgcaaactgtagtatgctatataagtgtaatgtcatataagtttaagcttacttatgtatattttcatagcttattcttttaacagtatattgtaattagaaaacaatgtctttttagattaataattgtgatgagaattagaatctatatttctttactaaatgtcctttttaaagacaaattttaatgcttttctaggtgaacacttttaacagtgtcattataaataaaatgaacagaactcattatagtttttgggttttataggtcttgtcaccaccaagtgtttgtagtgtttgtattattgatcccactttgtgatctttaggttactggagttggctataatcaatttggggaagtgattgttgatggtgatgttgttcatggattctataacccagctgttagcagaattgttgaggtaaatatttttttttccaagatggtgactttcttcataataacttaagacacagtgataggttcatagtttatgtgtatttttcttaggcgggctgtgtgtgcaatgatgctgtaattagaaacaatactctaatggggaagccaacagaaggggccttaattgctcttgcaatgaaggtacgtacctaaatttctcttctttgacatttgagacactgccctcacaacagaatgcagtgtcatcaatttcagtattactggtttttaggtattgagtgaaaaaaactcatactatttcattgtttttactatcttttaggtatcagttttattcctataaatgtaaagtatagacttttttcagtataactttattgttcacatgcaagttacaaactaatgagcagtcattgatttcttgtgaagaaatgttcctgtcttccacaatgttgagatctacatgtgaaatactttataaatgtgtgtaattgctgataaatactaacttttgaatgaataaaaggcaacattctttagtatttctatgtaaagataataacacagtcatgagaaaatagctttgttttcccagtctttcctttctctcctttgttaatttctcaaaatgattgtgaagttataatttgttttggggagaagaagtctcagttaacttttcatctgtcccaatccgtctccttatcccctaagtcctatatttgattcagtgagaaacctagtaagtccagcctgtcactcataacaaaaataactattcctacctttaagagtattcagagaaaattttgatacttgtataaagcaagaggcttctaaatgaggttgcttgaaatgagagacagtacagaattacaggttattataacatatttaatgaaataaaattgatagttttagaatatatagtttccttggcagaaaagcacatttctgtatcatttggtctccttacaactaaaacagcatagtactcaaaacatgaatccgttatcaagtatttcctgtgttatgcttataaagatattagtttctttgagggataaagaatatgaaactatctttttatgggcagagacctcacattttaggtagggaatttatattgacattcttgagacaaaaggcagtccaagacagcagacactgaaatcttaaacactgagtcacatataagataagaacaatgcaaattcagagctgggatatgagggctttgaaggataggaagggtttagatgagataagctagggaatgaactaaagtagaagtagagaggaataaaagagcatagagttggttgtggctaatgagttggccaaactggatgaaatgaaacgtatttgcacgaccaggaggatttttatagacgctgtatgtggtgggtttctggagaacctttaaggccaagaagagcctgaacatgtttcagtagaaagtagaaagcaatacatggtagaattttgagtagtttaaacatttttgatatttggaagatattttttgatatttttgatatttagatatttgatattgatgcaaacgctattaggagggaaaacaacaacatgactggtagtattcaggatataaagtggcagagggtaagggactaggatgataacaggtgagccatttgagtccctaagaagtgagagatttaatctaaaacttctattgatcataaaaatacatgctcagaattggttgggtacttttatttatttatatcctgcttcctttcagaatttgagtgggtagagggattaatacagtgtgtatgggaggtttagtcagcgtacaatccagaaaacctgccttagactatatctacatacctgggctttcatgttgaaaatgtatgctgatgtgtagggaagtacagtatatatagatggagcatttactatttcactattaactgaaaaataatccagccaacctagttacaagtggtgacccttgttctttgttaaaggaaaaaataatcacatataggtgagaattaactttctctttgtgccatatagatgggtcttgatggacttcaacaagactacatcagaaaagctgaatacccttttagctctgagcaaaagtggatggctgttaagtgtgtacaccgaacacagcaggtatccatctgtttaaagaatacttatttcctgtttagcttagatgactattttttcatttactgtccacctttgggtttagtcattgtacataataaagacttgttgctttaaagtacatgtaattaatagtacactcatctcttaattgtttgtgttctctttgatagtctttccttatagaatccatgcatagatatattcatggagttgctgctgtgtgagcaaacagcttaaatgagttgtagcctagtctcagtctcctgaagcttgtgacatcagattttttcagaattttttctcttcttcatgacagttccttataaggtctttgcagactgtgtttcaatctgtgttctttcactgaaggaatgtcttatctttagaacaaatgaagccaccttactttttgaaaagtagtttgcaaatgtatgtcattcatgttgattactccagcttacaagctgacaaaatgacataccgatattttaagccgccaccttgttcctgggtgcttgagaaatttttccagttagtgtaataagagttctgaattatctacagtgtataattatatcactcatagttgctattaccagcttgatgatgaaacttaactttaaaaaatattgaagcttgggctggatgcggtagctcacgcctgtaatcccagcactttgggaggccaaggcgggtggatcacctgaggtcaggagtttgagaccagcctgaccaatatggtgaaaccctgtctgtactaaaaatacaaaaattagccaggtgtggtggtgtgtgcctgtagtcccagctactcaggaggctgagacaggggaattgtttgaacctgggaggcggaggttgcagtgaggctgagacaggggaattgtttgaacctgggaggcggaggttgcagtgagccgagatcaccccagtgcactccagcctgggcaacagcctgtctaaaaaaaaaattacacacacacacacacacacacacacacacacacacacccttaaactttccttcactcttttgcctaggctgagtgcagtggcgtgacctcgggtcactgcaacctcaacctcccctggcacaagtgatcttcccacttcagcttcccaagtagctgggactgtaagcacgtgccaccatacctggctaattttgctaattttttgtagagatgggatctcattgtgtttcctaggctggtcttgaacccctggactcacatgatcctccaccttggcctcccagagtgctgggattgcaggcgtgagccaccatgcctggacttatttgttatttttatagttcctttgacaggaatgactagttggttatatgtttttacctatgagcaaacacatgatttttgcatgtgatacctatgattacgtctctatagaaaacaggaatgaagggatctcccttcattcatataagtggaaacatacagtttttaaaagaaaggccaggttggttaacactgaactttgaattgaagtcttccaggaactatgttcatgagggccaaaaaaaagatttccgtctattctttaaaggaacttttacaagcttaggtgaaagaagacaattggaaataaaactatgaaaatacaatacctttcactttaaacgttttaatgtaaagctttcagaaattgcattaaacttaggcgattttcagctgatgtcccttaaccacatagttatatggcaagcatatgcatatgactttttttgataggtctatttcattacattttgtaaaccatcacacggtacctcaagatagtgtggctcatgtaatgtttaataattttacttttcaggaacttttaatgtaatctaccaaagttttacattggaagattaaatcttcttagttgtgggagtgggggacagaaagtggcaggatatgtttggaaacatttgattattcttcacacttgctgacctgaagagttcctcttgcaagtgaaaaccaaccagtgaaatgaacaaacaaaacccaacccacagatgtgactcaggatctagaagaagtcatcctgacacagatagggaaacttaacattttaaaagtaacttcagtggctcagatagtttgcttttaaaggactttcacttgaacatgacaatatatatttatctctactatctccctggaacccaccaaaattactaacaaggaataaaagatataaactcagaaagtatagggaagattcaaaggtgccaggtacctttgaaggcagggagtaaggcataaggctaaaaatagtagagaaatttgaaattctgaataaggaaccaatagaactcccccaagtacctttgctgcttctttaggccagacggttagccttcctttacccctgtggaacaccagaaatctggggataagagtagagggtaggattaagccttaagactgaaaacagaatgattaagaagatgtcattgtcctgaaggataaagccctagttcttaacaccatttgtctcttggaatacatgaaggctggcatctccctactgtcattccctaagtaagaagattcaagagttttagaaaagctgcctggtctcgtaaggcagtggtccccagcctttttggcaccagggactggtttcctggaactcttccacaggcaggggatggttttgcgatgacactggtccacctcagatcctcaggcattagattctcttaaggagtgcacaacctagatcccttgcatgtgtagttcacgatagggttcctgcttctatgagaatctcaggccctggctgacctgacaggagattgagctcaggcagtagtgctctcttgcctgcagcccacttcttctttgtggctgggttcctaacataccatggactgtactggtccactgcctgggagttggggagccctgtcataaggggcacctttgagctaagctctttgttcattggaagcacttacctactcctggacttcatctcatcaccctacagcaaggcttaccagttgatccttagctctgccagtgctcatggagcttctagtcttttagtttcttcactcttttttttttttttatatactttaagttttagggtacatgtgcacaatgtgccggttagttacatatgtatacatgtgccatgctggtgtgctgcacccattaactcatcatttagcattaggtatatctcctaatgctatccctccccctccccccaccccacaacagtccccagagtgttcttcctgtgtccatgtgttctcattgttcacttctcatctatgagtgagaacatgcggtgtttggttttttgtccttgcgatagtttactgagaatgatgatttccagtttcatccatgtccctacaaaggacatgaactcatcattttttatggctgcatagtattccatggtgtattaaatacaagtgaacagggagggattactagatacttggagaaaatctttagtatgaaagccaaagaccaaaccaacagagaaagggatcttagagaaaggtagtggcagatgctgaagaaaatttccaaaaaccataaaaaagacaaaataactttcaataaaatgtttattaaataaagtcaagaaatgtatcaaagtagaacagaaagtcaaagacatgtacagtataaaaggtaaaaatcaaaacaaatacagaagatccagtaattaccccatagtggtaataggaagggtaataggaataggtaataggaagaaagaacagaaaatgagaagattttatcaactaatgctggaaaattttccagaatgaaaagactttagcatctagaataaagtggcccaccaactgctcagcacaatatgtatgttaaagcagagtggggtgagggataaacacaagacccataattaagaaatttgaggacacttggagagggagaattcgaagagcttctagagagctttaagcaaaggggagatcatataaaagggcttaggaactaaagtatggtagtctgccacttagcccagcgggatacattccaagactgctagtggatgcctgaaaccatgaataatattgaaccttatatataccgtgtttttttcgatccggtaacatagatggctactaagtgattaatgggcagggagcatatacggtgtggatatgctggacaaagggatgatgtccttggcaggacagagtgggatttcatcaccatactcagaatgttgtataattggaaacttatgaattatttatttttggaattttctatttaatatttttggactgctgctaagtaacagaaactgcaggaaattaaaccctggataaggggacactactttaatttctttatacttttcaatgaaaacattgacactggaggctggaagataatagagcaaagccttcaaaatgagaggaaatttatccctagctaaacttacaaatgtgaggatagaagaaaaatgtgtcccacaccacacaccctttcttagatattggtggataaaagaaaaaaaagaaaagggagacttaaaagacttaaaattcagtgaggatagaggtagagggttgttcctagataccagtggtacagcaggcctagaaatcagccaattagaaatggaaagaagactgaaggagggtggtctccagtaataatatagaggtaatagcttatctgcttctttgttgttgtgaaaaaataccatgagaagggttttatattacattgaagagtttaggaagaatgaatgataggtatacagaaaacaaattaaagaggtggttattaactttataaaagacaaaacttgaacaggaaaagaagtatcctatttgagctatcaatcaggataggccatgaaaacaacatcatgctctcctgctgcctccctgtccccaaatatctgctcattgtagttacttgggaatgcaggcagatggaagctccattttaatgtgagcacacactgtcacagcaggggtagaagaataggaaattgtgcactggcacctacatttccatttggaagtgacacaagtactcatgtttattggccaaagcaagtcatacctgaccgttgtggagtgaggacggcaatagggaaatacattcctgcctcccaggagaactgggatatttgtgaactgctatagtcattaccacacttggcttagcagcaaagagtcttgttgtaaacaaaatactggcagattttgctttagctatatcataaagatggggagggggggaatagatagtggaaatggggaaattaacatctgtcacaatagacagtgtataaaattgataactgatggagtagcagtataaacatgttaaaaacatgagggtaaatatcagagaaaacagctaagagagttaaaattattttgcttccatggagtaggactagtggtgagaagcgttgaacaggaaactgcagtatttcattataagcttttgaagattatttaccatgacaaaaaataaaagaaaaagtgcgataatacccataaatacagtgtgattgggagaattaaatggtgttttaggtagatagatatagacgtatatagtagctaatagagaacttgaaccattgtgagctgttatttctcttccatttcctgttatgttgcagtgagcctctttccacatttcagagtgccaaatttggggcttagtatagcattgccttttatgtgtgggatggtgggatagatgttttctatagaagatacagaaagctcccctataggaatatttaatcttcagagttcaggtggcagtcaaaaccttaggcttgagtaacttctctgggaattatgagaaatgaatgccacttaattttggactccaatggcaggtaagtacaagttgaaattaaacttgtgtttggtacattttcttcttaggacagaccagagatttgttttatgaaaggtgcttacgaacaagtaattaagtactgtactacataccagagcaaagggcagaccttgacacttactcagcagcagagagatgtgtaccaacaagagaaggcacgcatgggctcagcgggactcagaggtaaggctatttcagcatagtcccctggggtggaaaggtagagccttcttttaattgcagatgaattcatgcttcacatttgagctgtccaactcacttccaggatttgtagaacccttgccagtattgaggtgttaagttttagttggttaattggccctcaaaagatggaaatttgagaatgtagcaaaatatgaatcactggttcttttagatctccagaggtctctgagtagctgatagaaattttattttaaacaagtttatcttatgagaagggaaatggatcgaggtaaaatggtgttactctctttttatcactttgttttaaagacaaaaatacttttctaaaaattgagtctgaagcctctaatatatcctttaaggtgattgctaacttgatctgttactgttcaccagggaggtaaagaagtccccagattctgcttacttatatgctgctgactgagcagtgatggggagagggtctgctggacacacacacattaggccacctctcctagggatgtcatgtgtaagactcgggggttggtggttggtgtcctaacctgattcttaccttctggatagtcatctggcttctgcagaatatatgtagttatgtagtctctcacagcagttggaagagttggcttccttaattttattattttaatgaaataggagtctaagcactacaatttctgggaggaagaaaaacaagttatgtgaaaaatgtttttatttgttgttcacttaagcaaaggctttttttgagttttaaacattttgatggatttatagggcttctgttcttaaaataaactaagtttggaaaggtactcttaccagcagagaacattgctcccagcctgctgccattgcccttctctctgaaccttctgtgctgctgaaccaagatcactcctcatacccctgcccccagagcctggtgcatctcatctgggatatgggctgtattgtgaccatcttaacacttcatcccctgtctccaaggaaatgggaggcagagactcatggctgagaagttattttgcaaatggatattttggatggaaaaaaatttaaaggaaaacaacttttccttccccctttccccttttaatgtaagaggctttgatgacaggttctagagtttctggggtttcatcccaaaggcctgaatctggaacatgccctggatccccccacctcagtcctcaagctttctggacccctgaagccaaggcagattctttctcccagcgtcatttctggggcaggaggaatctcttttctggtttacctgggccagacctaagaatagcaggatctctgaaaccacagggttttgatgtgtttttatcaagccaaatgtacaattgccaactgacactctggataattgagcacagggggtgccctcgtacattgtaccgtcactcccttctgaacagttggcagaccaaactgtttggaagctcagatactctggctcagggtaacacttttgttccccttacactcctcaactttccacctcagctagggaaagagaatgacagttaaggcttgacccaggattataatcgttagagcaagtgggagtttcagagacttaaggggcactgcagggaggccttgctgccacaaaattagggtttggattgataaagcctgtgtcggaaggggcagtggcagctccactgagacaatcctgggaagactgtggtgcagagggcctgttactcccctgattcacctgattctggggctttgaccctttctttttaaatttacttttgctaagttgcacttatttattttttaaaaagaccgttggtgaacaaaatgtgaacccatttctttcctcttttgaacttctgggatgtcatcacttccagtttgttggctttgtttccagctattaataaagcattaaaagagtggagaaaaaaaggtagggaagtgggcagagtcttgctactcttagcagcacatagcaagaggttttaaagtggcatggatttagaggacttaaagaggtcttgaaggtctaatatatgctccctctttttgttagtttctggaacaaagttttcctacctcattatattgactaattcttttcatatgaaggattgtggaggtttgtgtatgtgtgttttgtactgtaacattatgaagtagaccagagttggtagaggggaaagtttttgttgcacagagttttgggaaacattctgctcatttgtctcttgcttcatgtcttttcttctttatctacccttgtgctccacttccatcctccccctgagattaccgtaatgaagaacagaaagattttaaacctcagttgatatgtacttacattacatcttatgaaacaagtttcttaaaatactgtggttcttaattttgatattagagtatattttgttttatgtcaggggctctccacatgaaaaaagtttacctatccttgactcagagagtagcagcagattttcactggtgctaaagaagcaaataaatacaggatactaacctctagactagtgccacccctccattaggagtgcgcagagctgatctttccgtcttaggatttgctgacatatatttttgtcactgtccccttctgttaccatcagcctctatcctaacaccaggaactgtgaagtggctcattctctcaagggtgaaagcctttggagcccacatctacataaataattaggtatatgactcttactttggaaaaatagaattacttgcttttaaccttgattttttttgagcatatgtaatctttcataccttctgcttgacgaagaatggatagtttctttggtctctctggggcttttcagtctcctcttgacttatttatgtttagtttgtatgtgcatgttacaagttgttcagtctaatatctcagatgcaggcacatccctttggttaataaaagtagtttccggagttccataattctgagagcaagctaaatgatatttgggaaatgaaaagtactttgtactatatcttacatgcccaaggatgatgacagggaaataagtagaaataataatatgatggcgttatttacatactcttagagaaccaacgttacaaataagaaatgtctgttcatgttatggaaggagtaaaagaatccaaactattgttggtattaatggttttacaaccactttccaaattagctttaccttccaggagttttcatgtacaaagttgttacaggctgtgtataattaactaatacagccttctcttcagagtgtttaatttttctggagatcttggaaatggaaagatgaagatccgttagaagccaccttcaaaggtgtttgcctgtttaaaattgactttaaagcctaacaaacccatagtttctctaaataattaattctattttttaaagaggtagagttcctgttgaaagtagctgcatgtgattactatgtgaaaatattgttcattttctgtctcttgcctactctgcccttcagttctttagtttgattctttttaattaaaacagcttaaagggaccccttatccagaaccattaaactataatgttttggtctgtaatcattttgattttacaaatgacattatagtcttaagtgatttatttaagaagtgttactgtctccaatttctatcaactaaattctgatgttttcatgactcacttttttttgttgttgtttggattttattatttcctaagttcttgctttggcttctggtcctgaactgggacagctgacatttcttggcttggtgggaatcattgatccacctagaactggtgtgaaagaagctgttacaacactcattgcctcaggagtatcaataaaaatgattactggagattcacaggagactgcagttgcaatcggtataactagactgctttcttttgttttcgatagtttttcttaaaatactgtggtgcataattttgtgaactattagttatgaatatgtttatgtaatattgagattatgcaattgaaatcgactcatggttttgctcatggtctatataaagttggcaaaactgattatagtttaaaaagtaataactttgacatgcataactaaatcatgaaatcacatgcattttattcacagaagggtaattatttttaatctcatgatcaactgtgatgacagagtaaaagcactagatcatgattgtcaaaggaaacatgaaacttagtttttcctttcaacttaagtataattttcaaagcagacttgtgcataatttggcagaaaatagcttgttatatgtatttgtttttcatcatgtatacctatatttgaatgctatttaagattaccgtaagaagtagaataagagcgaagaagagaatgaaagttaatttcccagagcctctaaactgtaattcatactgataaatttaacagttggctaaactccattaattcttatttggagaggggctagtccaggagtttcaaactatatattgtctaagaacaggtcactaggaacattatattattggaagaataacttttcgatgtttattttcatttatgtataactacatgattaccacagatccaccaccattttgtctggcttcggacactgtacttaaaatgcactctgatcttcgttacatttcagctgctgagcagaacctgattggcctagtttcgattcttaggtatgctagcttaaatagtcaaaattctttttttttttttttcctgtagagacagggtcttgctatattgcccaggctggtcttgaactcctgggctcaagtgatcctgtagccccaaagtgcagagattacaagcctgagccaccgtggccagccttgaaaattctttattcttaaatttaaacaaaaatgaaagtcaaacataaaactccagacttaatactgattcagataggtttgtattactggtaggtaacaaaagagaacagataacaaatcatactaaatgagcattacgttgactagcctgtcaagcaaaaacaatttggtttattacattttctctctcatttgctttagccagtcgtctgggattgtattccaaaacttcccagtcagtctcaggagaagaaatagatgcaatggatgttcagcagctttcacaaatagtaccaaaggtaggcctaaactaaagccttttggactgaaaggccttattctaagtgttaccatttctactactatcttaatgaaactgtttaattgtgaacatcagggatttaaataaccaccagatttgttggttcaaatcctgaaatgaagtcttatcattgaattagtcttatcattgattatttatgatatgatgtttatgaatatcagtgcaaaattattaattttagcaagaaccagatttcctctgagaaaagtactgtggaaattaatagtgcttgtatttatgaattagaggatggagagagatcattgatttatacttcttactcttttgttcaattttaattttagcatgagtatgtgattttttttaggtacaatttacatatagtaaaattcgcccattttagtgtatagttctgaacattgagtgatgcatgcagtcttgtgaccaccaccacaatcaagatatagaacagttccatcatccccccagattatcttaggcctttttgtggtaccttctccccctacttccaggacttggcagccactaattctttttttgtctctgccactttaccttttctagaatgcactaaaaattgaatcataccatatgaatgaggcttttgaatctgcttctttcacttagcataatgcatttgacatttatctatgttggttgtgtgtattagtagtttgttgttgttttttaaagtaatattctattataggtgtaccttacctattcaccagttaaaggacatttagattgtttccactttttgatgattatgaataaagatgctgtcaacatttgtgtacaggcttttgcagtttgtacacaaatttattttgcatgaaaatacattttcatatctcttgggtaaatatctgtgagtaattgctgggtcatacacttaatgtatatttaatttcataagaaactgccaagttgttttacgagatggctttattattttgcaaccccaccagcagtgcctggaacttctaatagtcctgcatcctcactagcacaagggattgtcattgccctcctcccccattctgataagtgtacaatggtatcttactgtgattttaatgtgcgtttccctcacaactagtgatgttgaatatcttttcatatgcttatttgccatccatatatcttctttagtgaagtgtctgccctgcctattttttaaaaattatgttttctaattattgaattttgagcattctttatataatgtggatacaagtcctttattagatatttgtttgaaaatgtttctttccagttggtagtgtgtcttttccaagagagaagcttttaattttgattaggtctagtttttcaatttcttcttttatggactatgcttttgatatctcagaactccctgcctaacccaggttcacaaagattttcttcgtgttttcttatagaagttttatagttttgggttttatacttaggtctgtgatccattttgagtgtatttttttgtatatgttgtaatgggttacggtttattttctttgcatatagatgttcagttattccagcaacatttgttgaaaagactgtcctttttccattgaaatactttttaacttttgattataatgcttttctaacaaattatttgtaggaaggaggtatctcctgccccacagcacagtagcttctttaaagccaggttccctgatatgagattaacttactttattatcttgggctgccttgtaaggggcctatcaaagcctggtttgtggatacccaggtcccataggaagtgccccataagaggtgggcagcagtcttcccagttgctgacagttcagatttcttggttttattgttagttaacttatatatgcacatctatttgtatgtccttcaaaataagcacttatctggaatttattttattagctattttgtagccatccattgttactaataaaatgtgctacctcctccttcatttattttacacttacaacttcaagttatatattcagaatgtggaattttcttaaattgtttctgcatcttaaggtatgtctatacttttttgattagaaaatttattcattagtggtatatgttcaacatagaaaaatcaaataatatagaaaagtaagagctacaatagaagttgtctgtaatctaacccacactcaggttatgcatccacagagtatccataataagttaacctattatgacttaaaaaaatgtgtttaacaaaacctggttgctactttatactgttataattctgaacattcattttacataactttggcatttctgaaatcaattattattagaaaacatgtttttaattgctgtacaatattttgagtataccatgtgtatgtgtgtataaatgcatagcatgcatatatatatatagagagagagagttacataaccattttcctgttgaaatttgagcttctattctttttactactgtaaatgttcctttaaggataatgacaatagcaaccatttattatctgccaatgcatgtattacctacattatctaatttacttcttatagctaccttatgaaagataggcagcaccgctttaaaaattctaataattaataagccttatttcttagcagtgttagatttatagaataattgagcagataacacagagttctacattcctactccatctctaccctctactcttacacagttcctcttcatattaatagactgcattactgtagtatatttattgcaattaatgagctaatattgatacattcttatttcatggtttacattaaggtttactttttgtgttgtacctttctaggggttttgacaaatgcataatgacatatatccaccattacaatttcttttgagacggagtctcgctccaccattagaatttcatacagggtagtttcattgccctgaaaatccctgtgtttgacgttttcatccctccccactccgcttgaatccttgacaaccactgatctttttactgtctctgtagttttgccttttccagaatgtgtatggttggaataatatcatatgtagcctttgcagactggatttttttcactaagcaacatgcatttaaggtttcaccatgtcttttcctggcttagtagctcatttcttgtgagcactaaataatattccattgtatgaaagtgccacagtttatcacttcaccttttgaagggcatcttagttgcttccaggtttggcaattatatataaagctgctctaaacattcatatacaggtttttgcgtagacataagttttcaattcatttgggtaaatactaagcacagttgctgaatcagatcatatggtaagagtatatttagttttttaagaaacaggcaattccatttttatagatgaggaaattgaggcccacagtacttgggagacttggctgatgtctcagagctagtaagtggtggtgttggcattggaactggaatccaggtctgtatgctccagagttcatctgttgtttgctgtttctttgaatattattgaacctaagatgtacccaactctgattattattattattgttattattttttaccactgcccttatccatgtacatctgattatttttatacactaaattcctgcatgtgaaatgattggactaatgttcaacacatttgtaaggccgttaacatatattgctgaattgtcctctgaaaaagtttctgtttatatttccataaactacacttcatacagtagcattaagtccctagacctccagccccacttccctcatcctctagcaagtggttagattttggatgttgttactaatagaaatacactattttgcttatccatattttttatttctcaacttctaatcactcatgaatgctgttttcagagagagccaatcatagtcctgaaagatgtaatctctaatgttgaaatcctgaaagattgaaatccataaagtcttaaaatcctgaaaaaccacagtccccaaagatcaaaatcctaaaaatctaattctggaaaaaataattttaaaataaaataatttacatttttaagaaggaatttatttgagaaacataaaaacatgaaaatgcttcattggtcactttatacaaaataagcaataataaataacctacatagttttgcaagcatttgcaagcataaacactcaggcatattatatgacagaaagatataacataggactgttatgagcatatgaactgtatttataaagaaataggtcataagggaaatgcataaacacctatcactgtggttgctaattgtgtgcaccccactttataactgtgggtcatttttatctttcacaaatgcagatgtatgaaaaggacatctgttcatttattgaggaagtttcaacatttttacatacatgtacagtgcttacatacaaagtcaacattgtgatcatgcactttcgtgaagtcagatttgcaaaacatgcataaaacaaattagaatcctttaagtctctataacttacgcttccagtgttggaaatgatgcaaaggtgaaatacatagcatagcaaattgtaaaaaataatactcacaatttaaaatagcggaaaaggaaactaaaaaaagaaaaataatggccgggtgtggtggctcacagctgtaatcccagcactttgggaggctgaggtggatggattgcctgaggtcaggatttcgagacctgcctggccaacatggcgaaaccccatctctactaaaaatacaaaaattagctgggtgtggtggtgggcgcctgtaatcccagctactctaaggaggctgaggcaggagaatcgcttgaacccaggaggcagaggctgcagtgagctgagattgcaccagtgcactccagcctgggctacagagcaagactccttcccccaccccacctcccccgccccaccaaaaaaaaaaaccaaattaacaacaacagcaaaaaacctaaaaagaaaatatgacatggaaaagcatattacagagataaatgatggacagttgcatggagatagtccataaaagctggctgactttcacgatcattaactatattttgaagtcttgcagcatgatgagtagttgcttttttttctttaagaacatggctgtcagcgtatgttcatattcattttctatgtggcactgctgtttttgaaattctatgattcgatgtacactaacatgaacattctctattaaattttcctatcctgtgattgtgattttcaggagtttagactttagggattttgatctttagggatttcagcatttgggattatggcatttggtattgcatctttcaagattatgatcccagtatgttgggatcatagatgactgttgggatcactgccacccagagagctggggcagtgtggatgtttgctttgtttttggggtggggaaggtgtttatatatttgaatagggctttttttttttttttggtgcacgtcctatcctggtaatctcttcctgaagtttatttctgaataaatcccatattggatttttttagtggtattgggacagagtattagtaaatgtatgtgaaatctgcagttacttaaacattttaccattagacttctgcataacttctcagagatgctaaaggtggtgaaactttcattttatttgctttcttcagtttgtcctctggctctcttataaaaattaaggtgaactctggaaaccaaccaaagatagttagggaagaaagaaactaattacaaattacatcatcagcctggacaaatcacattgttggggtttcccaagtagagtgtgtgtgcgttaattatagcagatatcctgatgctattccaaggagactaaaacaaaataagacctaagccctgtcagaagctcgttgaattgcttaaattcatcctactttaaagtggaattctataaatactagccctgcctcccaggtattttgtatcttttgaatacctaagtcttttctccaaatattattagagaattttttgtctcattaggttagcaggacggcccccaccctcatcttgtctttttccctacttcattttgtgttcatgtgacccttttatagccaatatgtttatttggccttcagctttttgattagtttagtttagtttagtttagtttagtttagtttagtttagtttagtttagtttagttagtttagtttagtttagtttagtttagttttagagatggtgttttgctttattgcccagactggagtgcagtggcatgatcatagctcactgctgccctgaattcctgggcccaagctatcctctgccttagcctcccaagtagctggaactgtaggtgctcaccactatgcttgggtaattaaaaaaaaaaaaaaagaaagaaaatccatttctgaatggatttttaaacttttttgaaagaaaggatttgcagaaatggagtctcaccacgtgttgcccagactggtcctgaacttctgggctcaagtgatcctcccacctcaacctcccaaagtgctggggttataggcatgagccactgcacgtagcctcgtcttctgctttcctttgtttgttttttgagacagagtctcctgctttgttgactaggctagagtgtagtggtgtgaccatagcccactgcaacctcaaactcctgggttcaggtgatctccccagttcaggtgatccctcatgactcagtctcctgagtagctgggactactggcatatgccaccatgcctaggtaattttgttattttttatagagatggggtcttgctgtgttgcccaggttggtctcaaactcctgggctcaagtgatcctcctaccttggcctctcaaagtgttgggattacaggcataagccactgcactcagacagtttgctgcttttgcttcacatcagtttgaataacttttattattgttacaaataaaacagaccttttgttctaaatcattagcttgttgacattttcccccatgtactagaatcatattaattgtgcccctcattaaaatatttttcagccatcctttttcataattcttttgaacacatttcattctccttttggaatatgaagtgttgctatgtactttgacctagagccagttaaaaagtagtactgaatctcagttttgcttgttattaagtcatctgggaattctcagtgttttccatttatgactttttctagtgtgtcctacattttccattgatccattgatagaagtggtcatcctctttcattcttctttttctgatttttacagcattacttgcatttatatttctactgaatctattcaccaagtccccatattattatcacaattcatatagtctaatttttaataggttgtaaacctttatttcaatcacttgttttttcttcagtgcattagttttctttaatctgtcctagaagatttgaggatcttcggtaggttattctaatgcaagacacatcttttccattaatctctcctttaatattttcctttctttttttttgtaacttcctttccctagtacatcttgtctattaatttccatcaaaagaactgtgagtgctgaccacaaatgtgacactgaaaaggaggactcataagaagagaaaaataccccttgtagattgcttctgaaaatatgtggccttgttctactctctttgatgatttttatctcttcctccaaatctaaaatcaggccaaaatacccaactgtcacaactggatcaagccagctgcaccttttaccaccaagtacaaggctcactgcaacccacggatacccatctaacttcgggacagccatgatccccaataggcagggatgacacccacgaccagcaagaagcagctacagaaaattgatcctcagtgcctctgcctcccataaagatttatggggatcatgtctctcggagaaatgaggcagaatagggaattagggtaatcaagggttaaggcataagtaaaagaacagtagatgcagccagttctaggcaagattaggcagcatttaggccacatccttaatcctgtgataacaagacagtagtctccacttcagcctctgattggctggggaccaagtctccacttcagtctctgattggtcacaggctaatccttcatagggtgtaaccaattggaggcctctaaatggcatctggtagtgttaccaaattcttttaacttaataaaaaccctaggccgggcacggtggctcacacctgtaattccagcactttgggaggccgaggctggtggatcataaggtcaggagttcaagaccagcctggccaagatggtaaaaccccgtctctactaaaaatacaaaaagtagctgggtatggtggcgggcacctgtaatcccagctacttgggaggctgaggcagagaattgcttgaaccaaggaggcagaggtagtgagccgagattgcgccactgcactccagcctgggctacaagagcgaaaatccatctcaaaaaaaaaaaaaacaaaaaaacaaacacacaaaaaaacggctgggtgtggtggctcatgcctgtaatgcactttgggaggccaaggtgggcagatcatctgaggttgggagttcgggaccagcctgaccaacatggagaaaacctgtctctactaaaaaatacaaaattagctgggcgtggtggtgcatgcctgtaatcccagctacttgggaggctgaggcaggagaatcgcttgaacccgggaggaggaggttgtggtgagccgagattgcgccattgcactccagcctgggcaacaagagcgaaactccatctcaaaaaaaaaaaaaaaaaacacaaaccctaaagaacattgtagttgggactcatgagccgcttgctcgagcccgttctactctatggagtgtacttttgcttcaataagtttgtacttctgttgcttcgttcttttgttcctttgtgtgttttgttcaattctttgttcaacacatgaagtacatggacaactcacagtcacaacctttcattcgctaacttattttgcagcttttgccaaacacttgttatatttcagtgctgtgtgctacatgattaatttctgcagtaattagagttttcacttggaaggttaccagtatgttttggatatatgtgtaactcagtcttttttttaaaggcacactgaagagtttctgaatggatttttgaacttttttgaaagaaaggatatttcccaaatataagttatgtgattcatgatatttggattgcctagggataatcagtagtgtgatattacagtgcagctgagtcttttgtttaagaaaataatactttttttatttagacctttattaaaggagagaaccagggaacagtctttatggtagtactgagatttattcagttgttcattcattttatttgtctttatagagcgctgttggtataggacaaaaatctctggcttcatgagtcttagaagataaatgaatataatgttaaataagtgcttaagagcaacccccccccccacaaaaaaaggcaaaatttgaatgataagagagggagattgaaatttttatatagtaagactagggagggcctcactgagaaggtactatttgacagaagagggacccatgttatatccgaggaaagagcattccagacaagggcagaggctggaagtgagtgtgcctggcatgtgtgaggaacaacgaggaggccaatgtagttcagtcaggaaaagattaatgataggagtgcagtgaggtgtgaacttcatgagggacccggtagataataaaggacttaggcatttgttttgagagagatgtgaaatcatttgagggttttgagaagagacacgcgatctcacttctgttttaacagtgccactctggctactgtgttgcaaattgactgcaggaaactagggcagaaataagaaaatcagtttggaggtattggcccagagtgtgggcaatggttttggagtaaggtggttgaattctggatatatttgtgagtggagtcaacaagattcgctgtcaaactgcttgttggcacataagaaaaatggaggaattaaggttggctcccaaaatttggagcctcagcaactgcacatatgtacttttcactaacagaggataggaaggagcaagattgagacatctaagaggaaatgtgaagtagggatgggaattagttttgctgatctggatttcagaagaaatgtctgggcttgagataaaaatgcattcaaaaaaatgcatgtaagtaaaatccaaagccatgtgcctgggtatgctcacctgaggcgtagggaattctgagacctcttatagagaaaggaactgagccctggggtgctccaacatctaggcatcaagagggatcaggagaagtctgtacaagaggaacagccaaaaaggtaggaggaagaccagtatcggtggtagtggaagccaagggaagatggtgtttcaggagggactaatcagctacgttagggtgcggctgagagattaagtcagatgagaaatgactgtaggcattagcaatgtggtggtggtggtggtggtgcaggtctttgaaagtcatgaatcgtgtttcactgcagttgtggtaacagtatgatcatgggatggattcagagagaatgggagacagcaagtataggctacttgctaaggagctctgctccaaaaatcctccccgttcctatatcaaaattttttccttgctgctgcactttaccatcagtatacaaacatgtttcctcttccatttaaaaaaaataaagaaaaaaaagggaaagggtggcagctgaaatgggaagggaagagaagtggtttttctttctttttttatatggaagggacaacatgtttttgtatactgacggtaaagatatagcagtgaggaaaacattttggcacaggagggaggagaatttctggagtaatggtcttaataggtaagaaggtagaatctttgacctgcagtagatgcatattgagttcatctgtagtaaaaccagaggttagttcctggatacagatactgagttgggggaattgtggaaattctcttctgattctgatttctccaaagtaggaagcaaggtggtcggctgagaaggaggctagagaaaggggatagattgcaggtacgaggagagaaaactaatatgaactaatcctctaggagaataggaaagagaatggtgtattatgtatattgaaatcaccataacttgtaaatattgttggagagagtgacatggtagtgaggcagaagttaaaatcattgtgaaatgaggggctgtgaactccggagcagtgaatgcttacagttagtgagttacagtctcatctgacattcagaactgaggttttatgaagggagaatagcggataccgtgttccacctgtaggctcccccagtggtactatttgaggaggttatagggatggtagtgttttgtggaaacactaggttagagcaaagtactatttgaggaggttatagggatggtagtgttttgtggaaacactaggttagagcaaagtgaaaaagagtaaaaaatagaggagatttgttggaacacagtgaaacgattttagatcaggagatggggtcagaaaaaaggattaaatatttattttggagagataaaaatcatataagcaatttagaagtacagtggaagagaggctaatgagttaacctgagtaaaagggaatgagcagacacttgacactgtaaaaaatggctctacagacactgagaagcagctgttctttattgctcctgaagacagaacaaagggaaaaggctattttagttgtatgcgagtgtcataggaaacagacgcaagagaatttttcctttttttgtctctggaacatttcaagaataaggctgttttctttccagagtttacacataatgatataaattggatgacttgtttagattgtgtatttcctgtggtacctttggtaaagattgaaatgaccatgtcagattaatgtcttaacaaacatatgtcatattgcttaagcttgatctcagtggcaaattaaatacagcttaaattgatgagtttttcatcattagttatgaatgcatgggttattctgtagaaatcttaatattgaagatttttagtgtatcttgtattttaacaggttgcagtattttacagagctagcccaaggcacaagatgaaaattattaaggtgagtgtgtaagaatcagattgttttatttctgtatacaaaatgctgctactttacttttgttatgtttgcattacagggagtagagcatcaaggtcagaaatactgtgaagcaaaacagttttttttttttgtaagagcttgacatagaaacactaatagagaatttagttggcataagatgtagaagaaaacttgaatgaagtatctgcaaatacagccttctttaaacagttagacagtataaaacaatgttctaactggggtccatagccgagtcatcccagcgtaaatagcagtaattagttagaaactaaataaatacagcaaggaaatagtgttgtgacagtgtgaacagtgcttaaaaggctatgattatttatattaattagtcaaatgtatttaaaccaactgatagagtatccagtagttaatggtcttaagttatgatagccagccattgtgtagttcagagtttctcaaccttggcaccattgacattttggactggataattccttgttgtgaagggctgccccatatgttattgaatgtttagcagcattcttggccccttcccactaggtgccagtaacatcccccaaatcctgatagtccaaaacatctccacacattgtcagatgtcccttgggagacacaattgcccctggttgagaatcattgtatagttgtttgaagaacagaatttagagatacagttctcacagatgggaatattagtagcaactttttctaagctttatcttactgagatctccatttgttgaagttcattgaacaatgggtggtctatattatttctaatcttaattatgtgaaaaaaatagggaggatttgtttatcgctttgtatggaagcaacatttttatcaaaattccttcctctcccctgtcctctgctccactctagtcgctacagaagaacggttcagttgtagccatgacaggagatggagtaaatgatgcagttgctctgaaggctgcagacattggagttgcgatgggccagactggtacagatgtttgcaaagaggcagcagacatgatcctagtggatgatgattttcaaaccataatgtaagctttgtttcagtgaatgcctatcagagaatcttcccctatcctttcctgtcccccacccctagagaattcaactggaaaagaattagtatttaaacattaggtaaactaaaccacttttctagggtaattatcctattttatggtatgaagaagatgatttgtgtggctggaacaggcatagtaaatggcaggaccctcatttaagaagtatttgccaagtgccagccacatttcacctttttctgggcactaatatgatggtatagtaatggcctttattttagttaaattcaggtagttagaaatatgcatatgtatggctctttttttggctttataataaatattgaaaattatgaagtttacatccatacctgttttttatatcagtaatttattcatcttgccctcatttaatgttataatttattaaatttaaatagctctatttgtgtcagccacagtttccagttgatttaagactccagtgtaatacatggtggtgtcagtttcacagtgttcaggtggggatcatgtgaatcccatttatttatttatttatttttttggtagctacctgttggatgacctgagtttagtgataaattccaattatatgttccaggctgctttattactctgttttggcctacagggaaacatttgggagcttaggactcacagtatttgccaagcttttgcaaggatatgagttttttctttccattattataattatatagaaatcttagaagaaatggggagttgattaaaaagcatagattttcctggattcagctaaatgaatgagataatttatatgaatccttgtaaaccatgttcttcatttaattcctctgcaacatgtgatctacttgatgtgcaggagcaacacgtagcttaaattctataattcctatatatctcattgccatttgattcctgacatgcattagtttaaacctttactctgcattttgtaccactaagaaaaatgagcttagaggaaggtgaagaagataatcatggctgggcagggtacctcatgcctgtaatgccagcactttgggaggctgaggtggatggatcacttgagcccaggagttcgaaaccagcctaggcaacatgtcaaaacccatctctccaaacaatacaaaaaaaatagctgggagtggtgatgtgagcctgtggtctcagctactctagaggctgagctggaggattgcttgagccaagaaggtcgaggctgcaggtaagtcaaggttgtgccactgcgctccagcctgggaagcagggcaagaccctgtctcaaaaaaaaaaaaaaaagataatcattttatgtattatgaatgtgaagtattttctcttgtgtgaagagacaatgcatgattttaatgttgaagtatcttcttcagaataagaattttaatattgtgacaaattagttcaggtagagcttaggcttgactttaattctttgctaaaataaatgtttccatattgatacatgtgttgtattagttggaattttattttatttatttgtttgtttgtttgagtcagtctcactttgttgccaaggctggagtgcagtggtgtgatcttggctcactgcaacctccgcctcccgggtttaagcgattctcctgcctcagcctcccgagtagctgggattacaggcatgcgccaccacacccggctaatttttgtatttttagtagagacggagtttcgctgcaccatggtggccaggctggtccgaactcgtgaccccaggtgatctgccagtttcggcctcccagtgtgctgggattacaggcatgagccacagtgcccggttggaaatttattttcaaaattagctctacagtgttttagtatagatacatttttgtatgataatattttctcacttcatctttattttttaaatttcaggtctgcaatcgaagagggtaaagggatttataataacattaaaaatttcgttagattccagctgagcacgtaagtttgcaagaaatttgtcaccatgggtcttctggataaattatatgaaaagtagaacttaagcagaatgcctagaaacttctctgccttatatttgtgagcattgttcatatgtcagttttccaaaaagaaaatttattgtattctgaaattttaaatggcatgataaataggttgtaaatgtaacagttagatgtctgtatcatcaaaatgtataaatctttgtgatttatttaatagctcacatctcattgtttcctcttggtatctttttccaaaagtagaaggggtattgtgtagtcaaagaacagttaccaaaatattgttgaaactatcatgcagatgtaaaaattctttatttgttcctgttgtctaaacatcttgaaaatcctttgttaaaatactcttagctttaaaatgtccacgtgactgaagaatagtttacttgaaacagtcttcctttaaaagcatagtagtaagagatttttaaatgctaaaaaagtggtatcatagaatcaacagatttactctactgatatttttaaatgactctctttttcaacaggagtatagcagcattaactttaatctcattggctacattaatgaactttcctaatcctctcaatgccatgcagattttgtggatcaatattattatggatggacccccagctcagaggtacgagttttttaattgcatgagctggaaagacaaggaatgtgtactaccctgataattaagttttaaaacttgatttatggacagtgttggaaaactttgcagcaaatgttttaacatttatgttataaattgtgtgatgtgtgtattttattaattctttttgagtgtgcatgcagtgtagatctgagcctttccactgttagatgcctagcctaaggttgagaatagatcaggaataggtgctatccctgtcctcaggaagtaagtaagccttttatttctaagaaatgggtataatggagaaatttctgggttcagttttattatctaggttctactgtcagttttagagactttgggaaagtattagaggacctgagtgtcataacttttttaaaaaatttaataataatggggtagttgagtgatagatgtcatttggccactccagcaaatcatcccagttaaaacctctttatatgaaagatatttcaaaattcagtcggtaggtcatgtatttcacaccgtatttgaaataggtaaacttacatgtaaatgaattggatggttttttgaaagttgattatctatcccctatcaaattgtgccaaacaaataaagaggagagaaaaagtgacaaaatcagtggttatttttgcgtaatcagccagcgttttatgatgcaacattttgtttctataagaaagcatttagtttgccgaataattgaggttagtgaggttgtgaaagtaacaaatccagaccttaaaacttgaaagtaatttatttttctgtttgtttttaagccttggagtagaaccagtggataaagatgtcattcgtaaacctcctcgcaactggaaagacagcattttgactaaaaacttgatacttaaaatacttgtttcatcaataatcattgtttgtgggactttgtttgtcttctggcgtgaggtatattcactggccaagctgctatattaacatgaattctgtatatctgataggattcttagttattttgatgggttacccagaaggctgggaagttaagggagctcttttagtgaaaaatataagaacattttaaaagagtttgatttccatctttatggataaataaaattattgattcatgtattagaataaatctgcagagaagtatcagttacaataaaaatacatgaaaatttagagagaagttggaaaatctgagtcttaaaatcatagagccactttattatttttaaataataacagtattttaatatctaatacatagttcatgagaagttttttttttactttttattatgtagattacagctattcactaggtgatttataggaaatttaggtagcttttatgtttcatgtgttaggctaaagttatttcttcctaatggaaagaaaatgtttatattttttaaaaagcagcgatttatccattaaattcagccactgaaaagtaattttgttattgcctcttgacagctacgagacaatgtgattacacctcgagacacaacaatgaccttcacatgctttgtgttttttgacatgttcaatgcactaagttccagatcccaggtatgtttaggtgaacttagttgattgacttgattgactcacttgagtagagtgctttctaataagtaggcaaagattatgggtttttagctttgcttaattttgtagccacagattgcagccccagacacagccttcttataaacatgtgccattggtcacaatgaggatggggcatttgtgggaggtaagctttatgtctgactagaacataaaagtattaataattcacaggtgttgtcatctgcgtttagctggctatagctataagatagatcgtggttaacattatttgagcatagaacaaacctcatagtttctgttgagattttattagtctcattttaaaagacagtattgctaggagtataagagcagttatgtgcctattttttttcccatcactcctgtcactgtgtcaaagcttaggacattctaattttgcttttcttcccttgttgtatcttaaggtgtgactgctgcttcttggtctaagtgttttgatagaaaataatgggctagagctttatggtacttttttagagcatattgtccttaaaaactagtttcatttgaggcatgactattcatttcagctttaaagcactttatgaatccttaactatattaccatttgccatgctggaacttctgagtacagcgaattctcactaattgaccaatttttgaagaagctgtaatatttatttttttatgaaaagtggttttactttttcagtacacacacaattaggtccattctccaagaaaggattttagattatctaccttagtgaatgtatagaaatgatttagcaaaatacaaataaagtttcttgatgtttgggatgttaaaaggtttcttttctttctatggtctaaattatatagtgtcactttttaagcaagccttttcttgataaataaaataaaagctactttaatatttacttttattccatctgaattattccaaaacagtagtaaaatttaagatatttcatagaattgacattgcacaattcagtgataaagtgacactgcttgttaaaaattagaagtgaatataataaagaagttatttctgtgaccaaggagtaataaatgaactctctgctctgccaacagaccaagtctgtgtttgagattggactctgcagtaatagaatgttttgctatgcagttcttggatccatcatgggacaattactagttatttactttcctccgcttcagaaggtttttcagactgagagcctaagcatactgggtaaagaaaacgttatctttatcatttatgtattttagataaatcatattttctaatgtgtttgttttaattttaaaattcttttaaaatagcaaaataagtaactcacttgatttgaaaaaggagtctattttttcacttggggaagctcaggggaattactctcctaactccagggttttggtttttgctcttttataggttatcaattgttataaaaatcataatacgtgattctcaaatatagcaaatcaaaacctgctctagagtatagtttataactttttatgtactatgccatcttgtatgaagagaaaactagacttaatctccctgaaaaccaagttgctctcttctttaaagttagaattttcagtaaactaataatttcattattctttcttgtttgtacattctaatttcacaaaatgtcagtctgaccaaatagcagaatgttttataaagactatttggaaattacacatttttcttacattaccatttattaaatgtataatacagtgcatttaaaaattagttttcctgtgtaggtgtgaggaatgatatatttgacagtaatgctatcctttattgagttctcaatttgggtatttatgaaaaggagttatacagtttcactgtattttttcttgtaagttaaaatttaccttaaaattgaactagttgaatttcagtattttaattccatattcacatttcttcctctttttaaaaaaatggcattttaaggaaacatctgcaattttccaagcagtaaataagaattgagatagtgtggatagtattgtaaagacaagtcttctatgctttgaaatagaacatattaatgtcaaatttttaatcttcagataggcattgtcattcaaattgtctactactgttgatacagtacttttttaaagggctgtgtgatctatgaaataaactccttttgttggtgatactgttaaaggctagccacataaggtttcagggaaagtggtcagaggacttgggttctaattctggctgctgcctttcctagttatgtgactttggataagtcacttaatatctttttttcttttcttatttttaactgagggtgattgtgcctgccttatggaatagttgtgaaacaatgtgtttgaaagctgtggtggccaggcgccatgcctcacgccagtaatcccaatacttcgggaggctgaggcaggcagatcacttgaggtcaggagttcaagaccagcctgtccaaaatggtgaaaccccctctctactaaaaatacgaacattagccaggtatgatggcacatgcctgtaatcccagccacttgggaggctgaggcaggcaaatggcttgaacccaggaggcggaggttgcagtgagctgagatcatgccactgcattccagcctgggtgacagagcaagacttcatctcagaaaaaaaaaaaaaaaaaaaaaaagttgtgttaaaatgctagaaaaatgtaagctattaagctttgcaactgtaagtttcaaagaaatgtaaaacccaacttattttctcttgcagatctgttgtttcttttgggtctcacctcatcagtgtgcatagtggcagaaattataaagaaggttgaaaggagcagggaaaagatccagaagcatgttagttcgacatcatcatcttttcttgaagtatgatgcatattgcattattttatttgcaaactaggaattgcagtctgaggatcatttagaagggcaagttcaagaggatatgaagatttgagaactttttaactattcattgactaaaaatgaacattaatgttaaagacttaagactttaacctgctggcagtcccaaatgaaattatgcaactttgatatcatattccttgatttaaattggcttttgtgattgagtgaaactttataaagcatatggtcagttatttaattaaaaaggcaaaacctgaaccaccttctgcacttaaagaagtctaacagtacaaatacactatctatcttagatagatatatttttttttatttttaaatattgtactatttatggtggtggggctttcttactaatacacaaataaatttaatcatttcaaaggcattctatttggtttagaagttgattcccaggagtgccatatttcagctactgtatttcctttttcttgtaatgtaagcagctcagataccatgtgctatcatttttgtatcaagttttttgcacaggatgtgaccactgtcagatcactgttcttttctttctttttgtgattgaaaagcctatactacaatttgaagtaaatttttgtttttcttagtaagtgtaaatggttgctttatttttattttaaaaaggtatgtctttggtttggcagaattcatgcagggctatcaagtggtgttctagggtaacagtgtccataattaacgcttagtcatagagtcaaaaacatttaagactgattgggttgaagtttataataaattatattaacatgtcttcctttttgaggtaaagatatatactttgtcaaatatcattttgtcatcctctaaatataaatccaaatacctcagctaagtaattctattttattatttttactgttatgtatgtttttaatcatatttcttaggaagtataggctactggacttagaataaaaagtccccaaacccaaacaaatggtttatgaaccagagtatatgtggaagattctttgctggtcttgctctgtgtgcatctgaagcttctttggcctagattttagcacaaacctgagtatatctcttctactttcatcatgtgttctgtaccttctttttgtttcattgggcatgctagggaaataggtggattttgtgtgtaatgccatcagtttttatgaaagcttgatgaggtataggtcatttgttttgagtatgtgggccagaaatttaaaattagaaatttgtttttctgttgagtatataaacaaaaattggtcccaattctaacaggtttaatccttcttgaagccaataagttttatcttttataatctgtcaggatgaaccactccttagcttttatccaatattaaactgcaagtgttagcactgaaatattgtcattgatagggaaaatatctattctttgagtcattgttactgaggcagttgagtgtaaggagctggctgcagtttattctacttaaccctttaaggctgaattgtcaaatgtacattgttccatgtcgttagatggaacatggaagccattgtctaatcaactctatcattagtgacttgatgtctcataccttaattttgtaatgatttttattctctgttacaaagacttgaaatacgtattaaatgcacgttaatgttttgctttgcattttaggttcagattatgacttgattgaaataaatgtgcctatacattcatttgctttgtactataaaaataaaaatgatttcttaagttaatgacatcccagtggggactattagcattaaaattatccatatggatgctgaagatacagaaattaaaattatccatatggatgctggagaatgcatagtacacagaatctatgatttaaaaagaagttgaatgtacagtacagatccagattgcaattttccataatatattaatccaagttgacatggatgagttaaatgggctagtatctaaattttaaatttttaccctatttcctaatcctaggacttgctagagtccctaacaatactaacttacttgatgtttttccctgttagactaccttatggagttatttggccccataatggctaaacatcagggaagaaaagaaaagaacttaaaataattcactgattaggtaaacagttctgaaatgatcaaaactggccacacagaacaaggctgaacatgttgtgtcacatttgtgctggacattgcatgacccagagatgaaacaaaagtgaaaccatgaaacccgaagaccctcccctctcaggatacaggctttatttatatagcagtaaccaccctcacaagaataagacacattatttacctgccatgcccatgtagggtatgtattttacattggtagtctttttgagatcacttaagttttggtctccttgatatactatataagtaaagtaagtattggtcacacttaaaaatagtttctcactgaaatgaattggaggcaaacaataaacataatatttaggaaacttaattaactctaccttgctttctgcctctgtcacttggcaattcacttccacatatgactcacccatgaagttagatgatgaactggttatcttttcattacatttttttagtacctggagtgtgctagaagtagaacgataatggcatccctgccctgtaggagcccatgaacacagatagcaggggatataactgctaataagctgtttcaagaaagtaaatagggatctttgcccatttactttaaaaatacacatagattaaaatgagtccagtgcacttttcactagatgtttccttgacattggcatttgaaaatctttgaagtgctttttaagactgagctcctgcaatccaaacagcagctgatttgcatactaaaacgtggtatggatgttcatccttaactagtacgtgattggacagacagatcattctgatggttaagtttccttgagctcagttaccacttgaactattaactcttatttaatgacattgttttgggttttggttgtcaagagttggttattgttaataatggataatggttaaccagtccctggtattaatgtagatacaattgtccataaacattgttgtaggtttagatttaaaaagaaaaagtagtatcatgccttcaggaagttttcagtcagttctggagaccaatgtgaaatatatccactagagtggtaaatgctgtccagaatgctacagtagttgaagtagagaaataacttcatgggatcctcaaagaaatttgtcatagaaatttcctagaactaatgacagctgaatcaaattttaagttgggaaactccagctgagaagcagtaggacagtgcagccaaacagcaaagcctctgcagaggtggtggtaggggctataaggaatctgtgaaaaccacaatgagtttgacactgttaaggcaggaggtacagtgtgaagggttggagagataggcaggaacctaatgctgaaagcagagacatttgatttgtctgatagcatgccagggcatttcaagagtttgatgtgagtttggatttttgtatcgtaacatgctgatggaagcacagagggtcaattgtgaagactgaaatagggagaccaattagaaaatcaaggaagcttaaggagtaaagggataattgagctgtggcagtcaggatggagagaaaggcatggaatttgaattgtcttttttttttttttttttttttttgaggcagggtctcactctgtcccccaggttggagtacagtggtgtgatcttggctcactgcaacttctgcctcccaggatcaagcgatcctcccacctcagcctcctgcgtatctgggattacaggtgcacaccaccatgtctggctaatttttttgtattttcggtagaggcagggtttcaccatattacccaggctggtctcgaactcctaagctcaggtgatccaccagccttgggctcccaaatgctgggattaggtgtgaaccactgtgcccagctttgaatttgtatcttctgagagatagcattgacatgactggacaggagaaaaggaaaatggaaaagatactagtctgtggcctttggcttgaatagtagagctattagcagaagaacctaagctaagcagggtttagtgggacacaggtccatctgaaatgtacagcttgtggtgtctttgagatttcccagacggatgtgttaatcaaagctatagctgactaattataagctagtagaaaaacaagcatccattttttttgttgttgttaaattaagcgataagtcaaagtaaactcagctttcacaaaataagattttctttaaaaactttcctttagcatagttattaatcagcaaacagttgtgtaaattcaaaatgcagaaggacaagataatatttcaatctcctttgttgttgaatgttaatagggaatctgttattaaggttactgactggaaaacactgatctgaattactggtagcaatttttttgatacatgtagtaagacactttctaagaggtgagagcgtgtgtgtgtgtgtatatgtgtgtgtctgtttatgtggcataccacatagcttaaggtatgccacgtaaggaaaccccaatgagtaaataacattaccattagaaaacagctacttactctgaatgagtaattatggcagaagagtagaaaacaatgttggtttttcatttgtttgttttttgagaaggagtcttgctctgttgcccaggctggagtgcagtggtgcgatcttggctcactgcaacctttgcttcctgagttcaagtgattctcctgcctcagcctcccgagtagctgggattacaggcctgtgccaccatgcccagctaatttttgcatatttagtagagacagggttttaccatgttggtcaggctggtctcgaattcctgacctcaggtgatccatgcgcctcagcctcccaaagtgctgggattacgggcatgagccaccacggttggcctgtttatttttttaaattttactcgtaatttttttggcctttctagcctcatatcctacacaatgctccaatacagtccacttccagatcattttggacagtgttactttaagttgaaatcgttttttctctgtcccaatgttgagaatcagagcttttacctctacttcagagcccagtgaaatgccaacaagaataacctttccagatttctagtgtgtgtttgtgtgtgtgtgtgtgtgtgtgtgtgtgtgtgtgtagtacagtttcttgtacactttttttttttttggcagggtgttgctctgtagtgtgatcatggctcactgcagcctggacatcctgggctcaagtgatcctcctatctcagcctctcaagtagctgggactgcaggtgcatgccaccatacctagctaattttgtgtatttttttttggtagagattaggttttgccatgttgcccaggctggtctcaaactcctgggctcaagcaatctgcccactttggcctctcaaagtgctgggattataagcgtgagccatcacgcccagcctcatttcttgtaaacactctttgaatgtagcaataagtttgcatataaaattgtgggattttatgttttagaaagcattaaaaatttaagttgaaaacacttgttgataaatctaaacagaaatttggtgatctctttcattcaaaattaaatgtcaaagtttggggagaaaagtgaaaacaattatttgagccattagtttttatccttagaaatccttttctaatgtaaatctgctggtgttctcgtgtacacgtgaacatatatgatgtaacagcctgtgcttgcacagctgctccaggtagatggtgtttcatttgcaggtcaccgtacacacctgattttgctattcctatcctgttttacgcaaatctggccaaactgacaaatatactgacaaaggcccacatttctgtggtggcttcatggctgttaggcctgacagaacttcttttcatatttaacccaagggtgccccagaatcattatttcttaagcaatagttgcattgctctacttaataacccttttgagtagaaaccacatctcattgttatgagcactcaatgccagaaactgagcaaactgttctatataaattccagagatccatttttgggctctggatttgtagcttttgaaaaatgtgccttttaatacagttttttaaaaaattactaatcttctcaactacattaaagaactttctattaaagttttctctgataagtataccaaagtgccctttagttgacaagtgacaatttggtgccatcttagggtcataaataaaataccatataatgcctggaccattgctcttatcaggtctgcatcttgcaggcatactgtgaaacacgtgatatgtgcatcttacaaataggtgactgtagaaaatgtatgtctgataggaaagacatgacaaactttacatttaagcattattagatcaattttaacaagctataaattagtatgttttaattcctattcctgtctcattcatctgtgtggttgcgtaataggattgcattagattttgtaagtatttttctatgtggagtgggtctggatggttggatggtccatgcatcagctagaggtattacaagttagggaaatagtttaatttgatcttgtttaactcacccacatggagctattatttagttttggtgtagaaactatggccaggcatggtgactcacacccttaatcccagcactttgagaggctggggaaggcgggttgcttgaggccaggagttcgagaccagtctggccaacatggcgaaactaaaaatacaaaaatctgtagagcgtggtgatgcatccctgtaatcccagcttcttgggaggctgagaaccagaactgcttgaacctgggaggtggaggctgcagtgagcctagattgcgccactgcactccagcctgggcaacagaacaagactgtctcaaaaaaaaaaaaaaaaaggaaagaaaagaaaaactgtgccatgctggtcaaattctcctgttgcttatttttgtaaataaagttttattagaacacaactatccacattcatttacaatattgtttattggcactgtcatgctgtggcagcaaaggtgagcagttgcagcaaaggtgagcagttgcaagggactatatgacctgtaaagcctaaaatatttactatctagccctttgtagaaagtttgcctactcatttagatattcaaaaagaggaaaataggccctgtaccttgcattcagtggattagaaaggaagtaccatcaattttctctaccctccaatctcccaacagtatattctctcttgaatggatgctcttggtagcagatttgatgtcagtgactactctgagtctccatcaaggcccccatgtagagaaagtcagagtgtctcagactgttgttaaaacatcatcaaccaggaggacatgccatcacattatcaaggcttcttgttcttacagtggctggagtgttctgatctgccgtcccatctgaattgtgcttcccatctctctctctttgctcacccaattttttatccatctgaagcagtctgctcctatctggttgatgggctcacttctacctcttggatgcacaagagaagtggaggtttccctcctattggttgtacaaacccagagaaataaagcttaatctgaataggcttaagtatgttatcttgcttagagaagacaacatttagtaatagcagaaactaaactatcctaacagctcagtcttagggaaaaaatatactcactaactcattttttcagaacagaacattctaaaccaaaacatatttgcatagttcccacagataccaaaaggtgactgtatatgtgcatgtatacataaatataaaaatatatttatattttgagagaaagacttagctattttaaccaaatagaatgttttcaggagtagcaggaatagaagagattgcatgtgcattgtagcatgttcatttttcatttgatttctgtccctaaaaacagaatccagtgaaactagctggaaatacttctttcatgtattatctcattcatttacttctctcattttaacagactgttatatggcctggtgcagtcacgccttttaaattttaaaacttccttccttaacatgaagttctcgtcttagaatttttacagctggatggacttgaatttggtattactcacacctctggaaagaaatgcagaagcagcttatcctgtatggctcagaaagctgttgctgaaagtggggtgtaatgtttttaatacatttttccaagagtagtatttaatttcaaattggtacaagatgcagaatcactttcagctgtgatgactgaaatgtgtcattaagacattacgagataaacaccaagtaccccacatctgtcttattgaaaatacagtgtcatattttgagtcaggcaccactgaaagtttatccttttatggaacttcctggtcttggtagtgacagctttccaggtgctgctcaggtaaatggtacaccagccagccaaacagcatgtggtagagagcagcacccagtgaaatctggcaaacttgctagggggaaaactgggtttggcctccttaggattatggagtagggccaggttataaccctggtagttgcaggaagaggaaattcctaggaaatggtaatatctgctcttcatctttttctatctttttttttttttttttttttgagatagagtcttgctctgttgcccaggctggagtgcagtggaacgatctcggctcactgcaagctctgcatcccgggttcacaccattctccggcctcagcctcccaagtagctgggactacaggtgcccgccaccacacccggctgatattgtttttgtatttttagtagagacggggtttcaccatgttagccaggatggtctcgatctcctgacctcgtgatctgcccacctcagcctcccaaagtgctgggattacaggtgtgagccaccacgcccggccacctttttctatctttaaacatgccaagggctctttcaaattgggctttaaaaacactacagaaaactctctgaacataggaaaaagggctcaagggggacaggtactcacatggggataattccttctggtcttttttcattattttctaagtttgagcttggctgcccattgaaattgtcttggtagttttctaccctttccagtgtggctacggctggagttgctataatattctcacattcctgcccatctttcttcttcaccatatttgatagtgttgatctcctttgcctctgcaaaattctgctcttaaacctgtggcaactctggtctcacgttgtcttaatctttgtactgcttaacactcactcacttcttcccacattccttgctttgccctggcttttcatgtgcggatataacaatggctatcacttataacacacttttagtatcaggcactgtgctaagtaacttaaatatacttgttattgtatcttttacacaataatttggactgttataatccttattttgcaagtagggcaactgaggcatagtcattgatttatttccttttgtgcacaaaggagaaaaagataattctaagggctttttagctatggtctttatcttctgaaattcaaattcagatgtcaaaaggttaatttgaattctttccccatgatcaaatggcatgaaagacctgtgattatatttacaggatgcatattaaactttcaaggtccaggtgtctcaaaaagtgcttttaaaaaatagacttccagtataattttatcaccactaaatacagaacatgattaggttatagtaaaagttttcctgtctctgcagctttctctctaaaatttattcatcttagctgcccagagttccttttgttacttgaactgctaattgaagacagtttccaaagcctaagatgagatttcatttgttagaactgaattagaaagagcaggacctaatcacttgattgcaaacataggaaactagattttggaaagggaatatgggatgtacaatattctgcttctacacaggtgttcctaatgtatatctgatctcaattttaaaattcctattctttaaagccaggtcaaaagccaggtctgagaatcttcttgtgatttaacctcttctcatcctggtgaccgctgtttccttattgtagtattcagtctgcactttgccattttgcacttgacagactgctttatgtaagggtaaaaaccacagttacttttgcaccaacttaataaaataatctcttgtcatttcattgtgtgttgtctcccaagcagcctgaacaagaatgtcttctgcagggggttcaggtgctatgtcatcatttttcggtgaaccaccttacatactcctgtgaagtgcctgtgacctctcatctaatacatgtaggagaagatatacaccagagtagtatacttaaagggacattattagactgtcactgctttactgcaaggctggataatttcagtggaatggtcctgagtgccatggttagagaaaggaacctgacttattacttctgctggaggaggacacttttaatgaaagaaaaacatggtagatgtaattcagtggttttaagaagcagtgttgatgataacccaggaaatgggacagttatattaatatagtctccagattagcttcaaactccaggaatcaaggtagggaggatttgatataacaacggtcttacatggtttttcttttttctttttttttttttttttgagacagtcttgctctgtcacccaggctggagtacagtggcgccatctcggttcactgcagcctctgtctcccgggttcaagcagttctcccgcctcagcctcctgagtagctgggactacaggtgccctccatgatgcccggctaatttttgtatttttagtagagacggggtttcaccatgtcggccaggctggtcttgaactcctgacctcaaatgatctgcctgccttggccttccaaagtgctgggattacaggtgtgagccactacatccagcaccggtctcacatgtttatagtcctcattagataccttattttccagtaacatttcttctcaaaaatagatgtacttgactactcttttcttgattcttctgggagtaaccatctctttggagatggttgttagtaaggttataaaaataaccttactgaggaactcccatgcaatcctctgaaaataataaaaatttccttatttcaagaactcttatttaacaaagtaattgttagggttgaatactctaggggcaaatgatttattgtgccttttgtaaaagtcaacacttggcaggtgtgtgtttgacactggctgatgctgggcttatttctctaagagtatggtaattctagtaaagtaaagaaaattgtttatcagatattaggaactgtacataggcctgctcaaaatggcagctttaaagctacctttagggctattcctgatggaatataccagtgggagagtacagaaggaagaacacaatttgtatgaatacaagtaaaatgaaggttgagtatattttcagatcttgcccaatgcatttattctacttggttctctttattttcaagttctcatttggaactggccggcactttcagaactctgggtatttctaattttagcagcctctatttggcagtattttccagagcagtaccttttaaacttcttccctacagtccacagtaaggaatatattttacacaatcacctaatacatgatatgtatatctgatattttccattctaactttttcattaaaaaatgctgggtatgactcattaaatactttcacatctcattaatgggtcaaaatctgtagtataaagagggcatagggtctggtattgctgcatatatctcttgatattttcacttctcactgtttcctccttctccaggtctaacagctcaggatgctgtttcttatttggctgaagccattagtttcaacttctcctttaaaacctggagtgcacctaaagtgctcttcaatcctgtcatggtctcattgactaagtacttacttttagtagagacagttttctgtctggcatcctcacttctaactttcattggccagacttcatactaaagtacaaagaggaaactgtttttaaaactttttgaaatgataaccagctgctacttaaaggcaataattgagtgagacttctactttctgagaatgtagctggctaaattgctgcaatttaaagcatatagactatattaccattaacttgctgaaatggaacatgagaagtataaacatggtttcaaacatatttagaaatacagaagcttcttaaatcaggttgtatttattaaaaacaaaatacaaaataacttggaattcagattattgtgatgtttatcccctaacaggtcagtcctaaagaaaaagctaattgtttcaagggtggtaacggaagaattttaagtaaggattatattaaatacatctagtttgatgcaaactgagttttattcaatgttggaggcctcactatgttcctctaagttttcaaccattaacaacccaaaccggttgtttccctcataccaacacttggtgtgtgcagtggttctccctctgttcttagaacagctggtattctgtttcttctgcctttttttttttgaatttgatctaccttttggtaggaatatttcagcgggggcatatgaccttgtggcattgaatagatattcataaagttgcttagcctcaggacatatgctcaggagactttctacagaggtcgatgctagcagttgctggcatagtccgtgcaccaggcttccactgtacagtctgttcaaagcaagaaaaaagtatgttgttaaagaagtaattcagtgcaacaggataactaccattgacatagcttcaacaaatgcatctaaacaatgagagctcttattgctctataatattatcgaaattacttaagaataatctgttctttgaaggaaggaactgagctggtatgacaaagattctttgctggtgatacttaaaaacttttcatcaacaaattacgtgatgcatgcttagtggttttgcagctagccccagactgagcaggtgtctttaacaaacactttaattttaaagaaaaggaatttaaaaggaccctgataaaccaaacaggcagtttgttagaatatgagaaaatttattggcatcatttgcaaggtcattcactgagactaaaaacctacttcacaaatagaagatgggattaattggaatccacaagtttattatggacaaagctgataaactggtaccttagcaatccatgtagaaccatcatttaatcagtgtaacatctctgtgtaaaaagccttggttatgctaagattcaagaacaatcctgctgtttaaatcattattaagagaactgttttgttttgcatttcctgttttgttttaaaaggatttgtggtaactaaagaggatccagtcaagaatggccttaaattattaaacgaaagaaataaagaatccaggggtcaaaggccaattagtcttatttgtgttagctcagatataaggcccagagatatattaacaacactgtttactgccaggaggctttttaccttgaaacatgtaaagtcccaccatattttgtatgcgtccatatatcctcattcaaagtattgaaggcactggggctgcaacagcaaataaaatagacaagcccctccccccacagagtttacatctgagtggagagacaaacaaaacacaatctatctcctttttatcttcatctctccctcaagtacctcctggatggtcaattaccaagatgtccaatccattgatcctatcacttttttcactgctccacaccctactgctgctgtcacttctttttatcatacccagcttaaactccacagacaaacattataattactctgtggcacataggctcaactcccttattgtccttcttgcctggtaaagcaaacatcctaggttaagttcacttgggcatctactcatcatctcacttagaatgaaagctccattagagctgagattctgtttttgtccctacaccctagcacagggtaggcatttaatatctgaatgaatgagtaagccatatgccaagtggtaagaaatgcaattaaaaaaaaatagagtaacaggactagagtgaatgagggtagacagtgtgtctcactagggtgggttatcagaaaaaggctctacaaagtgacatttaaagactgagaggaaaggagagagttgtatcctaccaatgattgcctcccctctcccacatattaatgtattacttaaaggaactgattttttaaaattggattgaatcatggaaacattctttgagaatatggaaataatttaatatttttcccgtttccagctcttcagctgtaacagtgactcaaaatcaattacattaagattagtttttttttgttttggtttttttttttaagtaactttgttgctttaaatataagtgaaaatactgtatttacttttgtgtgcttccatctgaactaaagtttcccatggtgcttaccgagttaggtctggctctgggagaggagtggacagcagctggttgagatacatccccatctggagacaggactgccactgacagaagatgtgagctgtgtctaagtccagtcttgtgcccagccgtgtctgcgccttcactctttggaactctgcatacaacatcttagcaccatcttcctgcagctcttccttacctaaataaagaaacagcccaagggcagtatttctaaaagcactgtaacagcttttcattttctccacatatactacaaattctataaagaaagaaattaatttaaaaaaactaagatgtttttctcttctggcttcataaatgccttgctgtataaattgaaatattgatactgaactgtctttttaatgatgacctaactttattcaacccatcggaatttactttttccctgaaataagatcttttccactggtctactacctgaccataaacatgtctgcatttgaattctctaaaccctaaatctgtgtctatgaaaaatacaaatgactattaaatattattctctttactgttctctttcaccgaaa

SEQ ID NO: 15 - DNA, 135125 bp, Homo sapiens
cactagggggcgcgtctctgagggcagggcctccgtctccgacgctgacttcctcagcgcagccagcactgtctccggtggcaagtcgaccagctcctcccacacggattctgtgtagaaatccacggtatgtgcattggaaatggacagggcatccctcaggaactgcagcagtccctgcaacttggcacgcagcgtgggcaggtccggggtcaccgggagagggcaagaagccgccatgacgctcaccctccgaggctgtaggtggcgcaaacatggccgtgaggcgccagctcggcccaaattagcacaggcaggctcagtagagctccgagccggattccttctgagcgattgattgcttcggcttggtgacgtattttgtgggcgtccgtcgtggtcttctgatgacgcagttagtcggctgcaatggcgccggtgaggcggtccgcgaagtggcggcctggtggtattgaggcgcgtggtgaaggggtttccactgtcgggtacaggaataagaatgtgagacagaagacatggcggcctaaccacccgcaagccttcgtggggagcgttcgcgagggtatgtaagaaggcaaccatttgcaaatcctcaggcttgctaagttttaggatataagattcgctgaagcttggaagaaggatttaggaaccagacccggtcctacttggggcaagggaattcattcctgagcccgctaaagctgtgagcttcgcagagctctagataggaagacggagcagtgttgctattatttaaacgtcttttctgacgtaaccctgtatttcatcagaacttttttcctatatttttcctgagaaactgagcagagagagtctatgaccctgtgaactcttgcgcatgtggtaaggtaaaggatagagaggaggacagggccagaaacactgctccgaattcttccttattacaaatacccgaggccctccagccttcgctttaatttgtgtttgtcattttgtattgctgtctgtaaggtctcttagatcccacttggaatatataaatgttaaattcagtcttccgataattgctagcttttcagacaaccatacactgtctttttctttcgtgttgaaacattttcgaaaacatgtagtttgtccaagatactagatgtggcattttctttcctattttttaagcatttattgaaggctcagattaagtgttttagatgaactaaggaatttgttttgatttgtgaatacagctgtaaactcaagttgtgcaacagtctgaactggtcagtttttctttgagattcttacttggatttccgcatgactgttagcctggtctttttgcaaagggccaacttactatgcaatccatcagcttaaatttgttgcttgaaataattttttaaagcaaaatataatactagaatctgaatgtgatgacgtaaaaaaagttttcatttgtaattaacagctccattcttcgttcaacttcttttctctgaaagtaattttggatgatattcctcaatgtaggacaaggctttgcttttcgaagaaaactgaaaatacagcaaagttacaagaaattgctacggaaggaaaagaaggctcaaacgtcactggaatctcaattcacagatcgatacccagataatctgaaacatctctatttagctgaagaggaaagacataggaagcaagcaagaaaagtcgaccatcctttgtcagaacaagttcaccagccgttgcttgaagaacagtgtagcattgacgagcctttatttgaagatcagtgtagctttgaccagcctcagccagaagaacaatgtattaaaacagtaaagtatgtattttcttcatttgaaatcctttaagtgttgttttattatttaaaagtactataggataatttatataggaattgtattttttcttatttaacacattttagaagtcacggtttaattagggaaacattttcatggaggctctatttttagcttcaataactgaattaggctggtttagcctaattgacaaagtaacgtaatgggaattaagagctctggaatttgggtttcttcctctcaagtacaggtggtaacttgattggaccatatgttatgactatatttttgaaaaataacttctgagaggtgttataattttagtcattaacagtatgggttctagagccagactcaacatgttagtgccccagtgacctcttctttaaaatgggaaaaataacactatgtcctctttaaattgggaaagataatactgtaatgaatatatacttcagagctgccatgttgcacagctccagaatggattactcacataaactcaggtgttcctaaggtgtttcatgacattgttgtgaagactcagcgagttaatgtatatgaggatcttaaagggtatatatggtacgtggttagtgctcttgagcgttagctactactattaatctggattttctgcagaggaccagaaatgggttgcaattgcaaatgcacagctccgtgacgctttggttttataagagttaacttataaaaaactatcgctgcatacttaaagttaaaaaacaatgctaaaatctaaaattgcaagaagctgggtattaacttgggagcataattttttacttcattaaaaccgtatcttttaaagtcgtgagctatttgcgctaaaaataacaggaaatgggaccacggggggtaaaaatgtaattggggatgaaggcagagacacaaaaagtttactacttttggtaggcttgatcattatattgttaaataatcagtataaagttcagggaaaagattagcagtagaaatgtagatttgagttattctctgataattgaagtaaggaagtttaaatcatgagaaaggaaggtaaaaaatcatgcttttaaagattacggtttattttggggtggaaacagggaaaatattgtcattgaggaagttaagcttttcaggactggagaaagagaaatacagtgacagctcagtccacagagaaaagttgtgagggattagtcagctatcaaatattgtggtcccccgttatctgtttggaagatgttccaagacccccagtggatgccctgaaactgcaaatggtaccaaacccagtttctgtcaattggaatgtatttctgttaatgtcttttacttgggaatttaatgccttttccatcttaaatcacgtactgtggccataacttttgcagtttgaagtatgacagcaaaactagcatgaatttatttttccttcacaatttgatgtatagaagattttttttaaaaccatagatcttagcaacttcaacatacgattttttttccttccttattaagtcaagaacttttaccttttcacttaaagcaaacactcagtgtggtgtacaatttaaaacatatgaattgtttatttctggaatttttcaatttaatatttttggacctctgttgactgcaggtaactgaaaccgtggaacagggaaaccatggataaggggtgtgctactgtactataaagttgaaggtgaataggactgaggacaggtctctggatttgtggactaggcagtcactagtcactagtccaaagtcgctagtgattagtagctattaaaatattatattgtagttacagagtatagtgaaaagttgaatgatagaggaaagtaaagttattactgaatcaaggatgctgaggaaatgaatggaattccaagtagttggattagccttgacaaaaaggacatcttcagagaggtgagaagtagttaaagatagaacagttcaaaatggtatctagatccaaggtatggtgattcatgactaggtaggtaaaatggaatagagaggaggggctcagaaaacttcgagattaaagttcatatatacacataattttcttaacatccttaaacaacaagtttaattcttttttcagtctggcatttctatcattcatatactggtttcattacttttaaaagtttttttttttaacattttaggatttttcatagctttctatattttttcctagttgaaatatttctctaagaatccccatttgtgccttttatttaatatatactcttaaaagctacaactgtgtttttaatacctttttggacattttactaataaagtcctgtttcctcatcccccaattaaaagctcctttacaattccaaagaaaaataaaaagaaaacatcaaatcaaaaagcacaagaagaatatgaacagatacaagccaaacgtgctgctaagaaacaagtaagttctactttgaaaatatttagtatagtttttcttatttatcctaaatatatatactatacctgttgtgcttcttggtgctgggcacacagtattctctctgtaaatatttgttgaatgaatgagtagtctgagcaaaggtagaggattgcatcttattccaagtccttgcttgtattatgtcaagcaatactagtaggtcaaaaataggattttgaacacattgtttataggtcaatattgtgaacatctgggacaaagtttcactgagtttggtccaggaacttgcacttgttaacaagcacctcaaaagatttttatgtatgataaaacttgagaaccactgacctaagaaaaatatagatgattttcataacattacattgaagaaagtaaaagcaaaggggaggtgttagaataaaatacttttttactataaagaggtgttcttgcctgtttaaaaaaaaaaaacaactattattttagcttagcaaaagttagcactctattatttagaaaaccagaattgtagaccagaattaggcttttttcaaatgaatacagaattacccacagcctcaacaaaattgtcattttgttgtaactgtggtagttcttgtttttccattgaagttttattgatctgtagctttaaaaagtataatgtgtcagttaaaaataccctaaagatatgtaattttgcttgtttttgctttagaatatctgtaattaagaattcttaacatcaaaaatgttttcattgttcttaagctggtggcagattaggagaaagcaggaaaatttcttcatgggaatactggaccagtattaactagcacagctttatgctttttccaaccatctgtcacctttggaaacagtatatcagatgaagtgcagtaatgaccattatgctgtaaaacatttaatgtccttttaaaattttgtttatatagagctggggctttgtgatcatgaaaattctctgttataccatgggtcattataatatgaaggcaaagagggtactttgcttcaattaggagaaacagtgcacatcttgcaaaatagaagagacaaaccttagagtgtttgcttagtaatagctatttcaagacaatttctgaactgtatctactgtttgttgctaatgaaagttacatatgttaataattttaggaattcgagaggagaaaacaggagagagaagaagcccaaaggcagtacaaaaagaagaaaatggaagtgtttaaaatactgaacaaaaagactaaaaagggccaaccaaacttgaatgtacaaatggagtaccttcttcaaaaaatacaagaaaaatgttaaacattttgttcctacaggttaaaatatctgctgcctattaggttcttctgtgacatgtgcctcccagcagtgaactaaatttgtcgacataaactggattgctaaactatgctaaatataagatgttcacatatttttattatggtaaaaaattttctaaatatgttctacatgtttcttatttatttgcctctgaaggaaggttggcctgaagaactgaaagaacctcttattttgcaagacaggcccaagcatgtaatacttttgtaccatatgagatttatatgaaataaattttttaaaaataaggaatcagagctatcaatgaagcatttcaatgaaatatttcaatttagtaaacagttacgttgttttaaaatttattttaatgatgagggaggcaaagactcctcttggactttttatttattttaagtacatgttacagggtgatgggtgctgaaataaactgccctcaccatataacaaagcgaccttcacaaagcagtgaactcaaagtctgatatttataaacattcccttaaatggatgtacatggcttgttagtctaaggtcttttaaataatgatggaaaccccacagtgtcacagcaagaattaagctttccagttcctatggaccctatactttaagaacattatctctgtctcccttgttggtacccttgtgagctgagataagccactgggataactgcttctcatgctttgcaaattgcagaagaatgagaaaggcttgaaatatatatatagtcattgtaagcaaaaagggctgaccaataatacttgccaaatattgaataataaaattttataaatgatagcaaatacagtctgaaattgcattaagattttagggagctctttcagtctactaatttattctgcatttcaagatcagtagaaagtgcttagataacactgaacttaatcttcattgcatagaaaagcaatgctttagaaatttgcattgcactatattgcatttaaagtaagcagcccagaaagcctaaatttggctacattggtgaagacacatcacatcatgatggaggataaattatttcagtaaattgctttacaatttttgtgcattttcacttctagacacttaatcatgacaaaacatggaaggagatctagtccttttgagagacaagtgaaagtcaaattatattcattttaacgactttgttaaaagctactttatgcaaaacttatattaaggagttactctttaaaattccaaagttcttgtagaggaataaatgccaagtaatggtataatgggggaaaaagtaatcagtgacaatcagataaagcaaaaggttaagattttagtgttatcaatgaagcacccaggaagcttttcctttttcgttttttttttttttattatcttggtggtggacagtctcccgcccacgctgcagtgcagtggtgtgatcatggctcacagcagcctcaaactcctgggctcaagttatcctgctcagcctcacgagtagctgggactacatgtacgtgccaacacctggctaacattttctgtagagatgaggtcttgccaagttcagccttgcctgggctggttttgaactggcctcagggatccttatggctcaaccttggccgtacaaagtgctgagattataggtgtgagccactgtgcctggcctataggcttcttaagaggcatgtttgaggaccctacactaaggaatttggatactgtagatgggcttagtaatggatgttttaacaggcaaccccagtgattctgctgggttgctcctcgccacacttaaaaaatgttggaccagggcctcagagaagaaagaggttttgtttggtttaagaaatcagagaaagtttcatgtgtgcaatagcatttaaggaaagccttcgaggttaaaaagattagaagtgtaagagcatgaggaaagttacaaagggaagcaagcttggtattatttaaatatctaataagtagttagaatatattattattgatggaggtaatagttcctatcggttccctattgtttccttccatgtggagaagacaccatcatccaaacactcatggtatctttacttcttgtcccacttgttccacccaggggaggtaaagtaataaatgatgtctgggaggaggacctgggctgtcagcagagtgcatgtactcttaattgctattctaatactataagtgaagaacaggctatattgataaatgttagaagggggatggatatttttggaaaatatatatagaaatttgtgctatatgggttagtacatcaagaaataaaagaggaataaaatttgaaggagcacaacatagaaagagagaggcttaattgtggccatagcttatggtttctggtttcagaccttaatgtatacgtagggagctttgatcttggtagtttgtagaggcttctattagggctattaatttgactttgtaagtgtgaagtaggcttttagttgcagttttggcaagaggctttaagacttaaggcacgtgggattttgacctaaaagtttaggatatctttgtccagagaaattggtaatttctatagagacaatgtgcaatactgggctttaagcacatatgcgcaggcctcaatgaagcagagtttgagtgagggtgatggagacatattggcttcagcaaagacagagaatctggaagtggggctcacccaaatgctggcctcatggatgtcctcaccagatgccagcccaaggtgaggcttagcaagctactgtagtggtgctggcatcaacaaaggcactggcatgtgcaagtggtctcatgcaggctactgcagcttgaccttggcctacattaaatatgcatgtgtgagcagcaaaggcctcactcatcagatgctgctaactcgacaccagaaaacaattttattcgtggcaaggatttaatgatataagaagaaatattcatagctatgctagatgttaatgactgtatcagtatttgctacttttaaagacatgtgccttggttgcaatataaagttctagaaaagctcaaggtctaaattgttctgagagtcattgaaatgctgtgtaaaagagaaaattttgaatctgaagatatttgaacatactgggaaaagatcaggtctcctttgacttggtgattgggactggaccactccaaattctatacttggtaagatagcatcagtgtttcagatgtcactttctgaaagagaagatagagtaccatgctaaatgcatggtgaaaagtttaacttgttgctgacaaatttcttccaacttagtttaagtgtgcagctcatgtgactggcattctgataaggctaaagccatcaccggttatcttccttcctactgattcatgagttcctgctatagagtttctgctacatgtagtctttggcaataaatactactgagttttgggagcataattttgtacaggataactgccttttaaatttggtgggtataaggcaagtattgtaattaccttgggtgttttattgactctccagaccttttgtaagttgaggcacaccatagagttattgaactaatttaacttctgaagtgccaaatgaatgtgttgtatccatatccaaaaagagacagccaggctgcagctgctgaaggaatcctgagaggcattaagaacatttctgcctgtgagtgaatccaataagaaactgggaagggctttaattttattgaacttttaccttattacagtgagagaatttgattctgggttttgattattttggtctttggacattaacttgaaaggtaacttaatatgtagacttaattttctccccaggagtttgataagaggaaagatttatactgaaaggtgggacatctgcattttgctggcaaattaacattgggtgctttttatgtatttggataattcccattgagaacacttgattgaatcacccatggagctgatagagagccctgtggtggaaatgctacttatgggcctgatgaccttgggttttacaaaaagatttattgaggtataattgactgagcatacataaaatgttcaatttggtgactcttgacacttgcatatgctcatgaaaccatcacggcaatcaactacctatcaccatcacttcctaacgtttcctcatggcctgttgtagtcaatcccaggcagccactaatctgctctgtcactagtatgcattttcaaaatttttatataatcaggatcatatactataaacttttttgtctgggcctctttaagtcagcataattatttggagattcatccatgttgttggatttatcaaaagtttgctcctttgtattgctgagtgttctattgtatggacatagacaatttgtttatccattcacctgctgataggcatgataggcattcttttttttttttttgagactcagtctcactctgttgctcaggctggagtgcaccagtgcattctcagctcactgcaacctccactgcctgggttcatatgattctccttcctcagcctctcaagtagctgagattacagacgcatgctaccacacctgactaatttttgtatttttagtggagacagggttttgtgacgttgaccaggctggtcacgaactcctgacctcaagtgattagccctccttggcctcccaaagtgctggaattacaggtgtgacccaccactcctggcctggctcttaaaaataaagctattatgaacatttgtatataagtcttctacgggcatacactttaatttctgttaggtaactacctaggagtagaatgactgagacacatggtagttagtatttaacatttttgggaaatatgacacctgtaaaatgactgggtactggaaaaggagcttcctggtaaaacggataaggagcctatgaagtcaaattagtggtccaacaatgacactcctctaaggacctcagtaacaccccattgtctgctctgtgttttatctatttgcagggtcggccttccagttcctagaggatatgcatgctgtattttctaccttaaatttcaccactttatctcagtctgttcttcagagaacaaataaaataactggggaggatgtctccagcaaacactgataggctatgattttaccagacttgtaacttttcccagtttcagttgtgtgaaactaactacaactaacttattgctccaactaaattattgccactcactctgtaatggtgttatggaattaaagtacaccagaaggcagcacattggaacaacccaaattacagcagatcctttgcatctgttggactctcctggtgcactgttagatcagactacttctagtcttcaggctaaagattctactgatgagagaaatatttgcaattgaccaagtaaggttcaaataaatccttataaccccccaccaacgtcattccaatatctacacaaacctgaagaaatcacaggaataaaatctattattgagtctttataagaataaggacagccatatctcatccttgcaatcttcccatatagccgtttaagaagcctatcaagaaaggatacccatttattcaagaactcagggtaagcaataaaattatgatttctagattcctggtagtttccaataggaacctgtcttgtcatccaattgctgaagaagtaaatatttatttcatagtggtagatgtatgtgcagcattctttagtacacatgtagatacagttaacatttgttcactgtttttgtgggaaaattaacagcatatgtggctatataccatagttgctccaccccccacccaaccctctgcatccctggttttgcttttcaaagtttcagttacgtgtggccaactgcaatccaaaaatattaaatggaaaattccagattcctaagttttaaattgtatgttgttgtgagtaacatgatgaaatctcacaccatctcattctgtcctccctgaaatgtgaatcatatccagcgtatcccagcagtgtatgctatctgtcttaggcacttagtagccatctgggttttagatcaaaaaataataataatatgtatatagagtttggttctatccatggttttatgcatcctctaggggtcttgaaacatatgtcccactgataagaggggtctactataccacatattggatttatggactcctcatcaatttgttttcaatctaaacaaaatgacttttctttgagggtccattctcacacaatatgtagatgatattttgcagtgccctcttgatctaagtatttcacagagactccatatttcttttcaagattagctgaaaaggggcataaggaatctagagaaaagtgattttgccaagaaactgaacaaattatttgagtcatgatctgtcagtacatgggtatttttcgtacaccaaaacaaagaaaattccattttactaaagctctaaattaaaagacaatgaaaaaatttttaggattgactggttattgcaagcaataaatacctatttttttaaaagttgctcagtcttcttatgaacttactatgacaacaattcctgagactttctcgtgtgatataaaagtagaagaagctttctcatcttcgaattcttctctttaacaacatcccactttgggtatccctaaatcatctaaaaaccttctctctcttgttcaagaaagacaagatgatgcattgggaatattaactcaagagaagcctgtttattgtctctcttagcatatcccttggtttggtaactaagatctaacccaattttcatgtttgcaggaggtggcagcagctgccaaactggtgaaagcttctgccaatgtggcatttacttttcattaactctgtggtttgcatgtactgggcaatcactgttacttctaggcaacactcgacatttatctatcaacaacttttacatttatgaagcccttttattctttgtgcatcactatttaccattgtacaaattgtactcttataactggaattcttcaagatgaagggaaaacatgactatagcaataactcaggaattaagcatacccaggtcagaccttacaaacacctttttagttaattctgatttaatatagtttatagatgggtttttactttaaaaaatgacaatggcatcctcttctttctgtatccactgaaaatgcagccattaaagcagctcattacattgtattctatcttcccaggtagctgaattaatagctctgactaaagcttgtattgtggcaaaagacaaaaagagaacagatgtgcttttaagaattgttcatgattttggaatgttatgaaaactggaaggatttatgacctcttaagatattttgactaccagtggaaaaatattaatgttttagtgaaagtgattaaaaactcacaaggagatcctagttattaagatagaagtgcatacgcagatcaaaatctgagggcagtggtcttgcaaggttacatctaaatgagctgcttttcacatcgcagctaaaagggatgctttaaaatggacatctctctccaccaaactttcaaaagaagtattgtctcaatttaaactggctatggttgacttacagtgattagctcaaccttctgaaaggcaaagttggggatcccctttccataaagatagattttggcaattttgggatttagtgccccatagcaccacaatcccaccaatgaacccaggtcagattattctatgattgttcacgttatagaattaaaaaaactacttttgcattaaataagtaatggtagataacaagcataatccaggtacatctgttaaggtgaggcatggttcagttcctctactcaagactcttgaggttttgcagataggctttatacaactgcctaaatctttaggctatgtatacacattagttattgttggtaaaagtttctggctggatagatgcttttccttgccaaagagctaacactgtcacagttgttaaaatattaaaccatacattcccaaacggaaatactcatttcatgagaataagcataaagaaactctgttagatctttccactaacccagaaaattcactgttagcattaccccagtcttaaagagaagtagaatgagtaaaggagacactgaagatgacactgtccaaattttcataaacatttaattttcccaggtctacattttcccactatcattaataaccatgtagtcctctcctcagagctcccatgggctttctataagatcattacaagacaccttccaccactaggaaaaactttactgatgcatgcagacctacctggatggtgtcagaaactaacctcctttactcagtcttatgcacagcagggatgagctacctcttcaaaggaaacaactcaacattttgcatgacctccaacccaagaagtgtgtcatttagaagacatattgtattagtttcctagggctacaataacaaagtactacaaggtcagtgtcttaaaacacaaaaatgtattgtcttactgttctggaggccagaagtccgaaacccaaaatcaaggtgtaaggagggccatgctccctttgaagatgcgtcacagggaaagattggttccaggattctcttctggctctggtaattcctttggcttatggcatcataactccagtcttcacatgttattcttcctgtgtgtatgtctctgtgcccagattttcttttttattaggacaccagtcattgaattagggtctaccctaattactgcattttaatttgatttcatatgtaaagattatatctccaaatgaagtaacattctgaggtcctggaggatataactccaatgtatttttttgaggatacacaatgcataacacatcaatgtaaaaatgctttacaacattgctgggacaccgtttttgtttcttctgtgtcactgtggaaacaactgccaacccaaatcagtaggtttctttcacatgagatattaaactgaggctacatcaaaagccttcagaagcagacaactttaagagacagtcatcctgcccaataaccctgaaccaaggagatgacagtggtatcatcttctgtccctgagacaacaaaataaaacacagcagaatgaattccttaggaaacctttcccttttaataattattattctggcattctttggtgatttagcctaaatatcatgagatcattctttttttctcagcacttaaccacattcagttcttagtactgtatattcagaatacatagtgacagcctgtgcatttgtattgcaaaaatgactgtgtatatgaaaactttctttttcatacacagaatatctccatactaccagtcccttgtaattccagttattccacatctgtgatggctctagtccccagtggtcataatccacttgaggtttgtgaaacctttcttgtgattctctgaagaggcccaatttacctgattgaaaattacacaagtcatgtggtctgaatggggacaaactttgttataactcagtttcaggggctaaaaacaatagttctcatcacaaatatgtcagtttcagcaatatttgagaaacgaaaaatatcaaagtaataaagggaaataagacaaaaagtctttagtgcaagtcttaaagattgatttgtaagtaactccttcctccctattccaattgggtttgtggaactgcagcttactagctattacctgctaactgattaggcttagtcatttagccttccttatgtcagtcttgcagattgacaggatctattagagatggcaaagaaatattttgtccatcaaaaatagttcatcactggccaggtgggttcattagttcaaggaaaatttcgacttgttttgtttatagcaatacaatgtcgctgtatacctttcagaaaattattatctcaatgaaacaactccatggctgaacttctgatatatggtgatatttaaatgatgatatatcctagagttgactaaattctttatggtcaaatcttctcctctgggatagaggaaaaactacaggaaggaactgatgaagtttgacgccttggacacatcacctacaaagcagagtcagccaaatgctataatcccaaattagggaactcacacagcagaggagcttaggtagtataaaataccccacacaaacaatccagccagctcagtatttacttaatccacaaactcagatatagccatccccagaacatcactgagaaactttactttcctaatacagaacagagatggttcaggatcttggggatatagaggatctactctatctctccttctctaagtttcttttgtgggagcctccaatattatatacatatgcatacatatatatgtgtgtataggtatatatatacacacatgcatacatacacatatatacatatatgtatatatacatacacacatatatacatatatatgtatatatacatacatatacacatatatacatatatacacacacatatacataatatatatgttttatgtatcatgtataaaattttacaacaggaatagaaaaacaagtagaggaaccttgcttgggttaaaaagtattgagtttgttagatttacacctgagtaggcctcaaattatctgttcacagcagtggagaaagtcaagtgcatctttaataccattcattccctcttgccatccttaagaaaacatcttttggaaattctacttgagtcactgtggctatacattttgaaggttaatttttatgcttttaaatgtagattaaaaagtgaatttattttaaaagcattggcatttttgtgtgactagcattttatgcttgcatgttgaaaatggtattttggatttcttttgtcttcatctatgtacaagttggcactcatgtatcatcttaagttataaacattcacaatgactgttttccctagttaaacatgataaactactggtaaattcattcattacattcttactcccaaactgcatttctaggcaaatttatgtttggtatgctttattaatagagtaagaagaaaatcaaagttttgaataagagaaaagaggcttacaatttacaataacccattgctagccacttaaaaatttttgagatgtattctgcaatatgaataattatgatctataattatggatattcatatattccttaaagagtatatgctctatcatcaattctgaagtcttatctgcattcttcaattttatagggatatttttacattagtagcctaaaaagtggaccactcagatgagtcatgcctacaacctttttgtatacatagaaattttaccagtaagacgtatgtactgttctaggaaattagaaaccactaatctaatatgaaaaatgagaatttttctttgctgttggttgaaatagtttatcagtatgcagtattctgctgttccaataattactgaaattgagaaacattattaatgatttatgtagagtatgataggaacaaatatgtttgaattattaacttacatatttacagtttggctaaggatggaatctatgtttagagttgtgattacaaaattattactcagttgtcacttttaaaaaaacctattaaagactttttgagaactagcttaaacgttttatcttggaatacactgaagaaatgacaaatctgagtttggcttctgacacagtgaaactgggacatagagcttcaagattagacactgaagtaataataaatactactctaaggccttcctaaaagtggctcaattaactaaactcatatatatttctttcatttagaattcatggtaacagaattctaaatgtaatttagaatttatagtaacagaattctaaatgtaatttagaatttatacatggagagagatgaagtaaaatacttcttagttatttattcaaggtcacataataatctggtttctgagctagaaacagaaactcagtttcctaactcccatcccaagctgctatatagatatctctagaaattccatctgtgaaatttcaatcaagacagatgtcgttaagcccgttgaaggttttgcttgttctgtaattccagatttcagactgattattatatagcaattcacagtggggtttttgaacagtagaaactggcacagcacttggcaccctgtcggcgcaaccatgacacacatacacattcaaattaattaatgtcccagcttcaaccgacttatccgggctgaccaatgtgatctcaagacaaatgacttttttttttttttaagctagcaatattgggagcagtaagctgttcttttttttttaacttttaggttcaggggtacacgtgtaagtttgttatatagctagtgagtcacgggggtctggtatatagattattttgtcacctagttagtaagtatagtaccctataggtagtttttccttcttaaaatgacattcatctacaggtgtgcatctagcattccatttctgagattctgtagtaaaggaaaaaggaaggcagatggaagaaacatttaaaaccatattaaatgtttacacggaaataaatcacatttcaactgcttactggcagtgcaattttgcaaaatcatttaccttttctgtgccccagtttacccatctgtaaaatgagcatgatataggttcataatattttttcccaaaactctggagtctgggggtatttcagaattctggatatttaggattttaaaaaatagttcagtggataccatacatttacataacagtcacagcagagtctcaggcatattaaaattgctgcagcaaaataaataaatattcaaactaagagacataattcaagaatataaatagcttcatatcaatccaagtcagatttctacctgtgtgagaataaatgaaacaaagttttcagaagtttttggctttcaaaataataggtaagaaattgtagacctaaaataatatgtacatcataagaacttaagtggttgaatacagtatttcatgcaatgcacttagaacagcaactggcacatagtaaatgcccatatatgttagctattattgtttattatattaactctgatatgttatacatcaattttatattgtttgcaatgaagtacagtcagttagaaaaagttttccaccaaatgtgtcatggatggatttggcaggtttgctgataagatttgtgttggattaaaggccaaaaataataactgctttagaaaaaagcctatatgtgtcaacataaaacacctgtaattacctgtaattgcaattatttctctgtaatattatagatcttaattacattatatttcatataaataatcttttctttatgccccagagaggcagtagtaataatctttaatatcatttttatattgctaaattgaaaatcatgcagagttgtcattgtcacaggatataaacttgttcaatcaatggcaattaaaacccttaaaggagaatacaaaaattctcaaatgacacttaagagtgttgaataccttacaaataatatctcccaatattttaattacttacccttgtctccctgttcctgaaaactttttaaacacttaatgttactcaaaaaataatattttggctgggcatggtggctcatgcctataatcccagcactttgggagctggaggtgggaggatcacttgttcaaagcccaggagtttggagaccagcctgggcaacaaaagtgagatcccacctctacaatcaatcaatcaatcaataagcaagccaggtttggtagtatgtgcctatggtcccacctacatgtgagatgggaggcaggagaatcacttgagcccaggagttcaaggctgcagtgagatatgttagtgccagtgcactccagcaagggtgacagagcaagaccaagtctcaaaataataataattattattattttaagtatatgatacaaattaaactttatattcctctctgtttaattgcagatactttttaaagtagactaatgcaggcaccacaaaaagggtaatgatatttttcactgaaaaagcccattttcagaagtagatttctaaacatattttcatattaatataagctaagagtttggacattctggactttggaagtactttgccgaatgttaagcatattatttttcctctcataacacaattgccaaatatttcaacatgaaagataggcattttgaggccaattaatagcaaattagtaatttgggatcatgaaagaaataatgttagaggaatatgtagatattgagacactattaatctggtactatacatatttaggaagtaaaattactatttttattgttattcatataagtacctgtcactgtgtaagagatttgtgaatagcatttcatttaatctcacaatgaaccctatgattccacttaatcctatgattggttgaataataacatgaaaattataaaatagtaatattaaaattgtccaatactgcatgtctcatttaatcctcttaacaattatccgatagatactattattgctgtcatttttcagttgagaaaattatgcttcaccatatttaataaattaacttatgtgcaatccaggatccacacacttcatacatagaatagtatgcatccaaattaaattactcaatatttgttttttgtgtacagaattttccaacttagtaccctactcgattcgagcatttggtttccaaataggaatgatattcattatctattaataaaagtttctttcaagccagtgattcatttcacaattgcaaaaatgaaaaaaagatattcaaaacttaccaaactggtgtatgtttccaaagaaactgtaactaaaatacagctatatttatcttgttttctagtatcaaaggtatatgcaaaatgattcagttacctgataaccaagaaatttttatacagtattaattctgctaatgaataaactgaatagcagtatatttttaggatgcatatgtatataaatattatatttagaaaaatataaatgttagtgtcacagaaatggagttttttaaaagaaaaatgatttagaattatgaatgattaatgcattggtatacatcttcccaatagtatagtgtttcttactctttctttctttctgtctttctttctttctctttctctttcttttctttctttctttctttttttttttttcttttttttttttttggaggaggaggagtctcacttttgttacccaggctggagtgcaatggcacgatctcagctcactgcaacctctgccccctgggttcaacctattgtcctgcctcagccctcagcctcccgagtagttgggattacaggtgcccgccaccacacccggctattattattattattatgtttttgtatttttagttgagacagagtttcaccatgttggcaaggctggtcttaaactcctgacctcaggtgatccgcctgcgtcggcctcccaaagtgctgggattacaggcgtaagccaccatggccggccgttattcttactatgttaaaaacatgtttttacatcttcaactattctaaatcagcattctagtgattcatagttgaataatatttattataattttgtgccataatcttttaattccaaattttgacttttcaattatgactatcctaaaataaaaagacaatgtaatgaactttgtgtatataaatctttaaacatttttctaatgagttttcctttaaaattttctgttttatactaaatatttctaaataaatttatatcacatgtgtatttgggaagctttagcatattaactatcatcataaatatatatcaagtgtatgttgcaaagtattccattttgagattttttaaaaactcccctggatagcccaaataatcggttttactgaaaaggaaatgcagaaaaacagtattgcatggttctgaaagacagtgagagaaaaatgattattttccaattccttatttatatttatttaaatataaaagtgcctaattaagttatcaaaaagttccaacaatttccatgacttctaaaagaaagcatattttattttcctaattaacttgaagcaaaatagctgccacatttcttttcaataatatctgatatattgtagtatgctcttagaaacttttagttctctagagggtttcgttttattcagatctttcaggaaggaaatatgctttcagaaaatgattttattttttcatttaaagagattagcattagatattaacattttgagttatgttcctatcctttaaaaaacaaaacaaaacaaaacatggaaacccgtattgaggaatccaagaatgtgggtttgataaacagaggttatgggagattggggccctggactatgtatttgttaattctgcttttccccacctcctgtgcacataaagagccattaacattgcaatgattaatttcagaatagcagaaaactctagctattactctgacatttataaaggaatcctttccttggaacacatgagggacatttgttctttctttctattagatacatgctctttgaaccaaagctagacagttattaaagcctgtctggcctgaagaattctttatggggcttagaaaagaaaggcaaattgatctttccacctagcatttattcttattttacaaatgtcttcttctgtactgctttataaaaacagaagattccatggtctatttttttctagcaattgaagggtgtttaacatggtgaagttgtttcaagtgttcagagagttgtctgttctatcctatagtgaaaatcattcttcagaaataagtatgtcttacgtttttggattaaattgggccagagagatgttgttgagtgaagaaaaacaggataaataaatataggagtgggacatcatgcacgtagatattacttagtttttctcatagagatctcatagaaagttacttctttatcatattttatctttaaaaatgaattataatgaaatgataccttgtagatctttttagatgaccaaaaatgacgaagatccatgaatttaagttacacttaatttgcaagtaatgcagccacccacactttatattaataaatattactacaacacagattatgtaggtaatacaaaataagcagagagaactacagatatgctttgtcttgaaacttattgtcaataagtagtgcagtagctgggtgcagtagctcatgcttgtcattccagcactttgggaggccaagataggagaatcacttgaggcgaggagtgcgagaccagcctgggcaacatagcaagactgtgtctctacaaaaaaaaaaaaaaaaatcaatcaaattagccaaggatggtggtgcacccctgtagtcctagctactcaggaggctgaggtgagtggatgacttgaacacaggagtttgaggctgcagcaagctaggatcacaccactgcattccagcttggttgacagagtataaccctgtctcttaaaaaaaaaaaaaattggtgcagtagttcaggtagggagacctttgtatgtgttgacgctatctatctcatgtaaggcagtttaatatttattcagtgatactaatcaaaataaagaattcagtaagtctatacattgtctaaattgtgttaaacttaataattcccaggttgtaacataaattaggctttaatataatgcgttttggtttctaaaatgagatgagaacatataatttgcactctctgtagtcacagcatgagactgcttaaactctgcagctggatgtttatagttacttctttcctaattctctttgcagtgctataactgaatgtgctacatattaaaatccatgtcttttgtgctgatgtattaatgctttttctaaagctgagcatttaactgcaaaaacaaaaatattatggacatataaagggctctgctacccctatttttttctgttgctgtaatttaaagaaaaatgaacttcttattatgacatagaacctacgcaacttagttccttattacacaacttcttctgaggctccagtgtatacattatacaatgaatgttatactaaaattcttatcactcagtaagcatcgaaccatgatgccacactgcatggggtcactgtgtttagaagatatgttaggtgtatatttaagaggtgaaatggatgggacttggtatttaattaactgaagtgggatgcagtaggcaagggagaatcttggattaccccccaattaatttttttgtgagaaacactaaaataaagtcataggcagagtctgtgtgtgtatggggaagtggggagtaagaacctggaaatgttactgtaatcaggttttggcacaatccttgtgatttccctatacctcgtctgtacctgtgtaaatggtttatttatgaacctcttctctagttgatttgtgtcatctgctttctgccaggaacctgattggtacaataattgtaatcagaagcagccccaggaaacagaacttcaaatttaggaaatgaattgcttaaatatttgaggagtattgggaagaaatgagatatggataattcattatgtgtagtgacattactattactcaaatgattacagcttttgtcatgggatgaaatatatgagcaggccgagggattgggatattaaatgattatgaaacttagctgcaatggctaacagagtaattataaactttttggtgtcacccggcttcttctgataacaccagagagtgtagatgtagaaattgtgctattgaaaatttaaaatatctggcatggatgatcagaaagcctaaagagcagatttgaatgagcctctcatttcctacggccatagagaagatatagaagagaactaagtccaaggtttgattgtgacaattgcggagttttaattctaataaattctcaacatctctaggtctcttatgctgatagaaaagtatcagtggaaaaggggtgaagttttaaaccacaagacagagacgtttgagcagcatagataaggctgagaattttcatgttcttcccagtcccaccatcaatttcgtcaaatagaagatagtaaaaaaagaaaaaaaaccacaaaaacaaaaacaaatctcttctgtataaaaaatctttgaatgcatacacttgcctcagaaactcattcttctcatggtgcacctataatttcttccagacctagaatggatgaaaagtagtgtaagaatttcagcacttcaccaatctgtattgacaagagaatgtgtgtgggaatggattttaagggattataccaaggaagataaaatgtaaggtgcaattgtgttgaactcattgtcatggatgcattcacccataatatggaatttaatattttgactaacgcatgtaaaaatacattaataacctgataagttgactaattgaagtgtggactcaccaataacctatgttttaaaaagtggaaatgcctgaattttgctggcattctctaaaggatgaagtccaaacacccccaaaaatagaaatgttggaatgaatctgcccagcccctttttactttaccttaaagtggggcagttgaggatacttccttctcaaggcactaagaaatgtgttattgaggaaggtgtgagcctggtaagcatggaattttgcaaactggctgctaaacacagctatcattaaaaattagactaattaactgaaaagactattgtaaaaataattattatttccccaactacatatctgtgtgaaacaggaatgtcttcaaatacttcaaccaaaacaacatattgcgacagattgaatgcaagtgcatatatggtggcctgcacctgtagtccagctattcaggagactgaggcaggaggactgcttaagcctaggagtttgaggatgtagcacaccatgatcatgcctgtggatagctgttatactccagcatggtccttgacaacattttaagactctttctcttaaatatatatatatatatatgattacatatatatgtatatatgtaatttacatgtatatatatgattatcataaaatagcagatgaacacctgtcaaaatttattcagctcattaatgagataactatcaggaagactaagctggttcaaataaacaggaattatattctcactggaaaaataatactgagtgagcatgccagtgagacacaaaacttgttaatatcctataaagcaataaaaccataatttcttggattatattttctactgaaaggaaataccagacaaagttacacaagttaacatgtaaaattacatagtttgagtctttaatcaatattagataattctttaaacatagcaatagaattattgatttccctagataaaggactatttcttgagttgatcaatgtttgaatttgacattaaaaggatatgctgctctccctttgccttatttccaaattttggataatttttcttaagtgtccccttataatgatcataagtaatttataaaggttgttccaaatcacaaagctggctagtttcataatattttaacctgattatttacatacgtaccttgagaagtattaattaatataagcctcatagggcatatagggttgaacaaattgctattagaaaattaactatggtctgaatatttcagaaggaaaacagagttagacttttaaatttctcttttttgcggttttattttgagtctagaaaacaaaaaacaaaagtctttttatacaagatttattgcagtgcctataaatttgagtgaattttctctttgcaatcactcaaatattcttagattcctggctaggaagtgactttccttatcacttgcaagactgggactttgttaagtcatatcacaggtgacagtccagtttggtgtgaggatgctctgggtatttgctccatatgtgaatttaaatacttatctttttaatgatgagctctagagagttatgatcaagtgtaattctataatatgacctgagtggtactgtcaatttgtcccggtaaaaggaaggatggattcttattgaacctatgaaataaatgtgttgccatgaataaaaaggctcagtacagtcatctgtttctgaatttggagaggtctctgagaatcagatatcatttttaaaaagtttcatttcaaattgcaaaactataatctactgaattaagggttagagataaattaatcataaaaggaaagatttcctttaaaatgcttcataaaatagatttataaaaataataccaatagcatgccaaaagaaataaccacaattaaatatgctttactaatgtatttgattctatgtaagtaatttctgttcttctggatctgttttcttgaaccttgcatctggactaaaatgattcctggaaatcataatccagtcctctggtggagtctaaatgttgtctgagcaatgttcacattaactcccaaacctgaaaccatgagttacagttacaggttattttaggaaagattacctggtacagtcctttcaacaaatctctgagactgactcaatcttttgcatgtagtgcataacagaaccttcaagaaaacatgaaataaaagaagaaattagcagttgttgataagaccgaatgacagtagttaatttactagaacaaccaaaaatatcagaatggaagaggacatggaatggtcagacaataaaaccagattcccattaattgataccacaaatgaaaaataacttactgaccctgtgcaaaccagatttatgtacacatgttccctgtcttaatgtccaaactctgtgacttctcattttgttcagcccttttgaacataatttatactttaactccaacctgccatcttgaactggcctaacataacagtgtgcaaaggacctagaatatgcaaaacaattttgaaaaagaagaaaaaaattgaaaatttagctatttgatttcaaaatttgtcacaaagttacactgatcaagacaatgtgcaagtagcataaaagtagatataaagatgaataaaacaccattgagtccagaataaacccatgtacagtcaatcaatttttttcattgttaacaaggtaattcaggaggaaaagcattatcctttcaatgcatggtggttaatcaatgttcatatgaaatattcaattctgcaatattcatatacagaaataaaagaactttggcctgtataaaacttaaaatgattcatagttctaaatataaaagctaaaaatatatttctagatgaatctttgtgattttgacttaggaaaaggttacttagattaaactatgatatgtaggctgggcgcagtggctcatgcctgtaatcccagcactttgggaggcccaggtgagcagatcacgaggtcaagaaatcgagaccatcctggccaacatggtgaaacccccatctctactaagaatacaaaaattagctgggtgtggtggcacgcgcctgtagtcccagctactcgggaggctgaggcaggagaatcgcttgaacccgggaggtggaggttgcagtgaacagagatcacgccactgcactccagcctggcaaaaaagcgagactccgtcaaaaaaaaaaaaatatgatgcataaagtaaaacattgataactatgacttcgtcaacataaaaaaacttctgttctttgaaaggcatcattaagaaaatggaaacacaagccacagactgggagaaagtatttgcacattacctatctgacaaaggacttgcttccaaaatatatacatcttaaaactcaataacaagaaaacaaacaatccattgtaaaatggggccaacgatctgaagatacacatcaccaaagaaaatatatagatggcaacaagcacaggaaaatatgccttgtatcattcgttatcagggaaatgtgaattaaaaccatatctcttagaatggccgagatgatatgaagggtggctgtggttatggagaaactggaactttctgtcaaaaactgcaaagggtctgagattttacccaacttgcaagctaacaaattagcctccacattttatgaatactggtagaagagacaagattcttgactcaaagacagagaacagtttactatttacaacaatagcagtagccagagtattatcattttttttcaccagtcccctgaaacctgatccccacagggttcttcaataaaggccagctggatgctataaatgcagtaggtttttatcacagcaggggaactctgagcttagaaaatctgtatcttttgtgatttgcccaacctttgacccagagggaggcattgtctttattatattagacagtaaacaaacctactctcagctctctcagcgctgttcactatacaaatagtccttaaaaaaaaaggtagtctgaaataaaaaagcagttaattcctttgctcccaaaatgggcagaaacttgaaaaaatagattccaattaccaccttagcaccaggcttgagacccttaccctgttaatgtttcccaacactcactgtgcttttgaatcacctgaagagcttcaaaaaaaaaaagaaaacgaaaaacaaaaaacaaacaaaaaacagcacaggagaaccaatgcctatctccaagattttgattcaatcaacttgagcacaatattttttctttgtttattctctaatttattttaaggtgcagccaaggttgaggaaaaaaaatattgcactacttttctggcataattttgaaactatattgggaatcagtattgctgtcacaggtgatcacagccagcccctaatgaaacctgtggaaaacaagtggggagaacgttttatcatttacctaatatgtaaagccgttgctctgagcacagggtgggctttgaagaggtggttttcaacatccattggggagttttctgaagtatgagtgctggaaaattcccctgctgcctctctcctctccgcacctgaatttcatggacatgactgctggaaggttagcatttcttttaccttttgggggtaataaacgaaaaataaagaggaattatgatagagcctatgacctaaaatgtacagaacaaaccttatgtcctgaaagatatataggaatacctcattttagctgtctatctttgaattttaatttttattaagatgtccaattataaaaaatattaatacctattttaattagtaaaaaagttcaaaaatgtatataaaaaaattaaaatttccccccaccctctccattcctacctcattgatagctgctataaagggcctagtcctttccttccacaacttcttttatgctgacccaaacatgaaaaatcatatacaaatgccatattgttgtgactgctttttaaaattatttatcatggttcatcttaatgattcatcattagcaatacatatttctttctgacaaatatgtatatattatatattttatttaaataattatataataaaatgtactaaaatgtattcaagtattttatatttgattactattagaatgtttcctattttttgccattacaaacaaattacattacgtgtcaccagatgcatgtcctttggtgttggtactttgttttcattggcgatattcaccaagtgaaattacttcagcaaatgttgtgtgcctgtgtgtgtgtgtgtgtctttgatttattgatattgccgaaatattttttaaatgattgcagcaacttgcactggatgttgttatattttgaatttttgccaattagcccaaggcttaagtatcccgttaatgacttgtaatcctcactgtgcattttacttttattctccttgactattagtgaggacaagcaggattttgtatgtttattgactctttagatttcttttgtgaatttccttagcataagtctttgcttatttttctattgagttccttttctatttctcaccaatttatagaagctttttgtgtagtagggaatttatgcctttatctatcatatctgttgcaatatttgccccaatcatttgcctttgatgttgtttatggtgttttccttttatgaaaatatgtgtgtagataaatatgactatttttcccttatcactgctaagcttcctgttttttagaaagaactttcccatctaaagataggaaattcttcaaaatattgttgcaatgattatattaatttaatgtttatatttaaatttttaaaattccgtctggagtttattttggtttagagtatgaagtcaatatatatctttgttttattttcgaaatatgaccaagtatttaagtatacattgattgataaactcctaattcccaacttgattcaattgtcatgcttgtaacaattccttaaattcctaacacactcttttggatgctctactctttacactgatctttttctttcttttttaatttttcctgtgcctgcttctgtttttttttttttttcaattttaattttggtgagtatataggtgtatgtagtaatggggtatatgagatattttgatacagacatatgatgtgtatcatcccagcactttggagtgttgaggtggagggattgcttgaggctgggagttccaggcctcagactattttgattattgtgattttatattatagtaatagcctttcagtatcactttttatgatataagctgtattttttagggttaaaagaggataagtatattttaacttgaatttttattatagttgaagtcattatgcaacatataaagtgtttctgtttttcgatgctagattattatacaaatatgtgaatgactttttaaagttaaactacccttataaggccagcagagggagttcaaggcactgttttactagtgaggaattacaaattgtttaagaatatattcttttactgattaatggaataaagttaagaattcaaaatattcactcaaatatcttgattggtcaaagtttacacatacataatcaaaaagtgcctatatatttatagccctccaaaagtcaaatcatttaggaatgaatctaaatttccttttgaaggagggaaatttttggcatatatttagtttatgtacacagtgcagataacataaaattgaaatgagtatagtaaatgtgatttctacttaccttttatgaccaaagtcagaaaaaaatcagaagactgtaaaatagttaataaatatatataaatatatattcttttgtcttatttgatcacatgagcatagttttcaaatgtaagaatatacatagaaacagaagaaaaccttgaatgaataatacctctaaatatttttaagtgcttttccccttcaagtgtaggaaattagaaaaggatgaaaacatgatcagctaaaaggggattgactatttagcaggaactttataaatgaactaatcttggatatgttattccaatggaagttttgtttgcagcctgctgctctttgctatttataaatactagaatgatggagactgctaggaagcagaaaatgcttcactgaacttctcggtgacagtaattcaatcaagcaaaggttacaaaagccctgtgggctgcttgttatgtgatagcagaggtagacctgattttgttgtatcagatattatttaagtcaggaagcttagtgttaaatttaatgctctatcaaagtaagtctattattctgagtttgatatatccatttcatttttgttctagattttgttctgtttgttttctatatatattatctgctgtgtgtgtgtgtatgtgtgtatatatacaggcatacctcactttattgcccttcgctttattgtgcttctactgtgggtagaatgctatcaaacagcattgcatgctacaggctacagagaaatcttttctgaagagaaaaattggttgatgaggcaaacttcattgttattgtcttattttgagaaattgccacagccatcccaaccgttagcaaccaccaccttaattagccagcagccatcaacatcgaggcaagactctccactgacaaaaagattacgacttcctgaaggctcagatgatcactagcatttttttagcaataaagtatatttaaattaaggtatatacattgggtttttttagacataatgcttttgcacagttaatagactacagtatagtgtaaacataatttttatatgcactgggaaaccaaaagattcatgtgactcactttattaccatatatactttattgtggtgatctggcactgaacccacagtatctctgaaataagcctatatagatttatttatataatattgtgatgtgtaatttattttatgaaacacaatatattataaataaaattgaatatttaaaggtataataatgtgttgataaaggttttaaaatttattttaaaactaaaatttctcaactatatgctatacatagtacagcaataattaaattttgaaaaaatattcagaatgatatatttaaactcttatcattattgaattttccatgctttcattttaaatattttacataaaatgagcatttaagttttgaattttgctaggaaacacaaatataacaacttttaaattcctagtcatacttcgcaaaaagttgtagtattcttgtaaaatacactcattttaaaacaggcttagaaaacaattgtaaataatatatttgattatccatcttttcttggagataagaaataacagagtattaccctaaaatgcattataaagcaaaaagttatacatattttagtatataaacttaaaaatatttctatatttttaagtaaaaataagcagttaaaagacaagcttcaaactgggaaaagacatttatacaatatattaaagacacagatcacagaataaacttttctgattcacaggataaagtttcccaattcaatattttttaaaaagcaagcatttccaagtataggtatttcttaaaagaaaaaaataaaaatgatttctagatacattctcaccagaataagcaaatttgcataatgaagtttttcatctatgttttttgcctttcaatttggctaataaaaacaatgataatgtacagtattgaaatttggggaagcagtaactcaggtgcattttcagggtgtctaatttgatgcaattttccagacaatttcttgacatttatcaagagattaaaaaatatccacacactttgacctgataattacatttctgataatttatcctaaagatataatctttgtcattttacattgactctccctttttcctggaagctcttcctcagatagctacatggctaactccccactgtcttctcatctatctttactcatatgtcacctattcgataaggtcttccctaactagcctgtttaaaatgcagatcgaatccttccaactcatactcccttattctgcttttttttctttactccatagcacagtacatcttccaacatacttataatttgtgtacttatcgtgtgtattggttatcatgtcttccctcagttgaatttaggctcaacagggactgaaacccttgccttgctccaagatgtctcatttccccaattttctggaagagtatccagcatgtagtaggtgtttataataaatatttgttgaatgagtgaatgtcaaggatattaattttaacatcattaatgatagcaaaatttttttaaaaagaaaaaatttatcttaaaaattcctctgggaatggttaagtaaatcatgatctatccatgtgtattattttcctagggctgtcataacaaattaccacaatctgggtggtttatgacaacaaaaaatgtattgtgtcacagttctgtgggccagtgtctagaatcgaagtgttgattccttctggaatctctgaagaagaatgagttccatgccccctaacttctagtggccactggaatctttggtgtatcactgcaatctatgcctcaatcttcataacaccttctctctgtctgttgccacttctatactctcctaaggtcacgtaccattggatttaaggcccaccctaatccaggattatcttattttaagatccttaacttaatcacatttgcaaagattctttttcccaaataaggtcacagattcatgtagacatattttggagggccaccattcaacccactataatatgttacattgttacagcactatttaaaaatcttagtttggttactgtttaaaatctttaaaaatgttcataatgtaatgtttaatttaaaaagtaggctgagcccagtggctcatgcttgtaacagagagattttgtctctgcaaaagataaaaaattagctgggtgtggtggtgtgtgcctgtagtactagctactgagaaggctgaggtgggagggtaacttgaacccagaagtttgaggctgcagtgaactgtgattgcgccaatacactccagcctgggctacagagcaagaccccgtctctaagaaagaaaaagaataaaaggaggatacaaaactttatttctatgtgcatatgtgtgtatgtttttgtgtgtgtgtgtgtatatatatgtgtgtatatatatgtgtgtgtgtgtatatatatatgtatatatatatatatatacacacacacatatatattttcacacagagaaaataatccaaattttgactttttttttcttttttttttgagatagagtcttgctctgtcacccaggctgcattgtagtggcatgatcttggcccaatgcaacctctgccttttgagttcgagcaattcccatgcctcagtttcccaagtagctgagattacaggtgtgcaccaacaccaccagctaattttagtatttttagtagagatggggtttcaccatgttggccaggctggttttgaactcctgacctcagttgattcccccaccttggcctcccaaagtgctgggattccaggcatgagccacagcgcctggccaaatttttgaattaataatgtgaaggaggtgccgggcacggtggctcatgcctgtaatcccagcactttgggatgccgaggtggctggatcacctgaggtcaggagtttgaggccaacctgaccaacatgacaaaaccccgtatctaagaaaaatacaaaaattagcggggcgtatggcagcgggcgcctgtaatcccagctacttgggaggctgagacatgagaatagcttgaacccgggaggcagaggttgcagtgaaccgagatcgcgccattgcgctccagcctggatgacagagagagactctgtctcaaaaaaaaaaaacaacaacaaaaataataataaaataataatgtgaaggaggaaatataccaaagaaattaaagaaagtctaatgctgggatgctggttggtaggaatataggtggttaatttttctattcataatttctagcattttccaaaatttctattacaagctgatttaaatttttatatttacaattctcttactatgaaaaaactaaattaaaatagacctcataaaatgatttattggaaaactagaaaaaattaagtttcaaaatggcacagcaattaaccatttcttttatatctaacaccatcagttttaccgtcatgaaatttttatgtcaatctgttcaggaggctacgaagtcatttgtccctaggggttttcaggaaaatatgagagaaccattcagttgggaagtttagaaattcacctttcagagaacaagtgaagctaacacactcttggactcccttgtagccttatgatttagtcagttttagcatagtatatacattttatgatttaccaaaagcatattaattagattaaaagttctcatcttgtctttgaacttgtcttctttggcctgctttttacatttgaccttattatgctcaatttcttcaattgctctgttttcctaattgattaattaatgtcataagtgtcaccattctgtgttctctctctctctctttctcttccttttcctcttgttttccttgccttacccagtgagcttgaatttgtatttgggagcattatcagtcatgaatggggagcaggtgcttacacaggaggcttgcatttgggctgtctgaagaactagtctcccctatctacctgcttaatagcacatacgaggttacttccgcaaagcacaataggcaccacacaggagtctggtctgtgccaagactggatggaagccgtggagggaattgtgaatataaatgtcacagagattcctgtggttttgttctcatttatttgaaccttgattgacccaattattatgtgcaaaaacaaaacaaaacaaaacaaaactgtagaggtagagtctccaagataattgggtatatacactggatgatcctgggaggaaggtaaagatagggaaggaaaataaataattagttctgttttaatattttaatgattaaattatttaatgcaatgtgcaatgttcttttctagtgatacatatgtgggagatctcccaaatgtatatatagtgtacaataaagtcaaatatacttaatctgttcatatttattaataaacatgaattaattaaagcagggaagaacttgatttgcaaacattacctatattatcggaggcataaatgagagcagtttcctaaatttgctaattgttctgtcctgctgtggacattagccagtattaggccttttagccccaacatgaacacttccattttgaatctcgttcaaaagatgatacctccaggaattcagcaaccctttactttgaaaatctatccggtgtacctctagggaaatctactggattgtctctcaattagccagctaagtctaattctctcaaagccgtttagcaccacatcaatgatcggagaagctacattttatcagattgcatttaaactggtgaggagagtcacctcccctattttgcacatgatactgagtacattctggtgatgaccactcctcaggcttcaaatgtgagcatgtcagttacacacgaggaaagtaaccaagtccctgccaatggtctttctcgatcttaatctttggttcttctatttaccttagataacatttgtaaaagggaaggggtggttacatttgaagctaagtgacctaagtattttgtacccaacctctgatggcttctggagatgagggtcatcaaaccagaagaaagactgacagtaagactcagactttcttctagtgtcgcctgtcttccgagaattagattttttttccttggttatttttagaagcagcatgattgctgctgcccagggattaagaaccgcaaaccatgttctctatgaaacattttcaagtcaggactgtgccatattcatttttataatatttgtgatgtgccagcatcatcaaattccaataaacttttcttcaatgcacctaggttcaagtctctgctgggacacataaacatgagccagccatttaagttccctgaggctcattttctccatctataaaatgaatgttttaagatgctgctattgtccattttgaggaaaaaacaggctaatgttaataaatatatttgtaatctatggcattgtatgggaaaataattaccattttcacatgctaaaagtgtttatagataaataaatgctgtattgttgaagctctaagataaggttaaaaaaagttgttggaatacccaatttgaatcttgacaaggaacattggtatacaatttttttgtcataatatcctagttaatttttatccatagcactttaatcacatatttacttgtttgttttaaatattttctcgcttgttaataacatttactgaggaagagaccttggtctaccatgttcccagctgaatcctgagcagttaaaaataacgtctggcacccagtagacactcaactatttttgaaatagatcaatactacttcattgcagagaaccactcaccactggatctcagtctgctaatgtttctgtctgcttagtatttttgaaacttcttgagactggagaataggaatgatttttaagatcacaatttttgtatcttatgtaaattgaaaagaaaaatattaaaaagcgtatgtttggagaaatatgttttgctgctgaaaattacaggattatgcaggggacaaattattaaaccacagtcgtatggcaggcaatatatgttttactttagatcattaaacttaaccttttgtgattaatatcatactcttatgtgacattttctaggaaacagatttcagcacttgttttatgtttaaaagcattactggctttcctactaacaaaaaaacatttttgagtggaatcttataatccatagcaaaatcttgtctttaatcagcatatacaaatattgtttcatgtttattcaagcatgcactaaagtgactggcatatttttggcagttctggtcaaagtttttccccttttcagaaatgttaaaccaaactgacagtttggattatctgacagccttcatccacaattgtctaattttttcacaatgtgagccaaattattttcttgtatatagagtacaaaaaagattgaaatgttatttcctatgattgttgctttccaatttgagaatttatggagacgttatagctacatgcaaagacatagatagttgatatgaaatattcctgaaagaatcatgttaaggattttagaaactttcttttatattccacttgctctggtggaggtaatttaaattttattctgaatttgaacattttagttttgcttctttcacttgaacactttttaaagatgtctgtctttcatttctctctgaatatcattatacattttgataatttgttcttctctgactgataatgaaatttattttagcattttaagttctagatgagagttgctgggtcaactggcacttcctcagttcttaaaacaattcccttacttttttttctgttttggcaaaaaaaaaccccttaattaacaacttattttaattggtgttcacttaatctaatgatattcaatattttaatctagaggaaaatatccaaattccttatcactgtcttcctttatctaatattgtgatagtaattccaatttaaaaataattcttatcagtagataacacgcagggaaaatacaataaggcccactaattttgagagaaactacttcaatataccatgttagaacctatattgtatttcacttgatagagaaatattacaaaattaattagtaccattgccttaatcaaaactctgctgactgcaagcaatagaaactaatatgagtgaatttaagagaaataggaaatttaataatagatgttgagttatccaaggaactgaagggcagaagagcctctcttgagtagagtcaagacaaagaaaatcattaggattcctagctataataatctgtctctttgctctgtttttctctgaacgtctgtctcactacaaagaagtttgtagacagacttcttttgcttctttatatccatgacggaaaataattactaacaaatactaagtttattatcaacattgtttcatctattcaaattgactatctgtgaccctcagtttcaagttcttgatacattttttttgttctcctttttttttttctaatttgactttgacactctggtaatcatcagtaataccattcaccaaatatttctgtcttggtttccaccttgcaagcatacgataggattttacttcctagctccattgcagttgggtgagtccatgtgatttattctggtcaatgagctgtgagcagtagtgatgtgtgtcatttaaatatcaggaagggactctatagaggcagattttcctctgttttgatgatcagtaatgttacagttaatggttgctttatcagcctgagttcatgaataaagagaaggcaaattaaggtccccatccatccttcaatggagccagaaataaactttactgttttaagtcactgggattcggggatcgtttgtttgtctgtttgtttgtttggttttagcagacacagccaagctgtttggactaatatatacatggaattgtgttagatttgcaatattagcatttagacttgatgtgttattttaaacccctgggccactattttgttcctctgtttactctgcattcacactattttcttgcctttggttcagtacccattttcttctgtcatgtcctgttgctgttgtaagaattctcagaggataatagacaaaggcattaaagtgtattggaacaagcactgacctatgagttacgatacatacattcttttatgcatctatcagccatgtgacaatgtggcattttataatttgggagttcagtttcttcatataaaaatatattatactctgcctacctcaatcagagtgtataaagagtaacatactatattatacaaatatatgttctattgtctatcaatctaggtatctatcatctatttttctttatataaattccttaggtatattttcccaaggtgtagctgagaattattttatttgctcggtttagccaataaatatgcaagcatataaatttataaataatgacaatgatatgtaacaaattggtagtaattactttaaaatactgtaattgcttctaaacttttgtttccttactatttctgaaattatgcttgaatatagtgatgaaaccaaatgataattcatatggatcatgtctaggtggagatttaactgtgttgcccattgagtgtcaatagatagcactaagtttataccattacatctatgtttctgattgcacactgtgatctatcagtcaagagcagtggcatgagatttggaagacaggagcagtctttctgtcctctttgagtgtcattctgtgagaaacaaagtcctggagaagtgaagtctgtctgcagctgcttctcagccttcattcttcagcttttgctattgagagggacatatctggcataaataataatatctttttaacttcagcatcctgacaccttgcagttatagcttatgttcttgaaaccagttgttccagtagtagataaggaggtggtaactttagcaggtcagttctttttctgttctttatttttggaggcacggttcagaggttgctcttgcagctttctcaattatactgtaagcacctaacctgtattaaatttactcttacataaaatatttagagaaatagttctaaaactttgatatgcctcagtatgaggtggtgggcttttaaaaaatcatattatctggctttgctgccaaaattccgatttattaggcatggagtaggatccaagaatatggctatatgagaagttcccagattgctgaatcatggaccacacttgaagaaccatcaacttagagtattttctgttcctattcagaatctgtaattaaatagaccttgtcctcagatgtatcaaataatctaggccaaccacaattatttctgaaacattcaataattgggctcattattaagtgttgcatcctaaatagacactgttaattgagtttacaacaaaatgcttatcaataggtttcaatacagatttaataatcattaaggaattctagaattacttatgttcagtgtatattttaatttttattctttgcaataaatcttgtttcagtgatgtcatacagtaacagtatcatacagtgacatatacttctttttttcccctgatatttctgccatctgaatataaattaagctcagacaggtaatatttttgtcactatggatatttttaataacttctgtttttaaaatagaaatttaaacagagctaccatttaaaattttgtcattatttcatactgtatatatggtaaatattctcattttaaattttagtttaatcatgatattttaacttagttcaactccatatattttatataaggattttgagatccaaagataaaagaacttagagaaagagttgaagctataaactaaatcatttcacacctagtccagtaattaaaaattaatacatattaattttagagcagttttagattcacagcagaattctgcagaaagtacagagagttttcatatacatcagcccttgacactcccagttttgcccactatcaacacaccacatcagaattacccatttgttacaatcgatgaacctacatcgaaacatcaaaatcattgtttccattagggttcgctcttggcgttgtacatcctgtgagtttagacaaaagtataatgacatgtagccaccattgtggaatcatacagaataattttactgccctaaaatcctctgcactccacctgttcatccctccttccccttttcttcatctattgatacaatcatttgattttttcttctttcacctggtaatacgataagcttatttttgaattttgaaccagtctgcatgtatgagaaaactcccacttcgtcatggtgcataattctttttataccttgatgaattttgtgtacttatattttgtttaggatttctacatctatgttcatgagagataatggtctgtagttttcttttcttgtaatgtctttgtctgggtttggtattagattaatactggccttacagagtaagttagaaggcatttcttcgtttctgtcttctggaagagattgtagagaagtggtataatttcttcattaaatgttttatagaattcaatagtgaacccatctaggctgtgtgctttctcttttggaaggttattatttatgcaatttctttaatagacatggccttattcagattgtctatgtctactagaaaaaattatatttctttttgtgtaaattttggcagattttgtcttttaagaaattgataaggggtccgttcaaaaatggccgaataggaacagctccaatctgcagctcccagcgtgatcgacacagaagacgggtgatttctgtattttcaactgaggtacctggttcatctcattgggactggttggacagtaggcgcagcccatggagggtgagccaaagcggggtgaggcattgcctcacccaggaagtgcaaagtgtcaggggatttccctttcctagccaaggcaagccgtgacagactacctggaaaaactgtacagtcccatccaaatactgtgttttccccacagccttagcaaccagcagaccaggagatcctctcctgtgtctggctttgcaggtcccacgcccacagagccttgttcactgctagcgcagcagtctgagattgacctgcaaggctgcagcctggcgggaggaggggtgtctgccaatgctgaggcttgagtaggtaaacaaagtggccgggaagctcaaactgggcggagcccagctaagtccagcaaggcctactgcctctatagattccacctctgtgggcagggcatagcagaacaaaaggcaacagaaacttctgcagacttaaaagtccctgtctgacagctctgaagagagacacacataggctcaaaataaagggatagaggaagatctaccaagcaaatggaaaacaaaaaaaagcaagggttgcaatcctagtctctgataaaacagactttaaaccaacaaagatcaaaagagacaaagaagctattacataacggtaaagggatcaattcaacaagaagagctaactatcctaaatatatatgcacccaatacaggagcacccagattcataaagcaagtccttagagacctacaaggagacttagactcccacacaataataatgggagactttaacaccccactgtcgacattagacagatcaacgagacagaaagtgaacaaggatatccaggaattgaactcagctctgcaccaagcagacctaatagacatctacagaactctccaccccaaatcaacaaaatatacattcttgtcagcaccacatcacacttattccaaaattgaccgcatagttggaggtaaagcactcctcagcaacaaacaaacaaacaaacaaaaaataaatcacaataaactgtctctcagaccacagtgcaaccaaattagaactcaggattaagaaactcactcaaaactgcacaactacatggaaactgaacaactgctcctgaatgactactggataaataacgaaatgaaggcagaaataaagatgttctttgaaaccaatgagaacaaagacacaacatacgagaatctctgggacacatttaaagcagtgtatagagggaaatttatagcactaaatgcccgcaagaaaaagcagaaaagatctaaatatcaacaccctaacataacaattaaaagaactagaggagcaagagcaaacaaattcaaaagctagcagaaggcgaaaaataactaagatcagagcagaactgaaggagatagagacataaaaaaaccccttcaaaaattcaacgaatccaggagctggtttcttgaaaagatcaacaaaattgatagattgctagcaagactaacaaagaagaaaagagagaagaatcaaatagacacaataaaaaatgataaaggggatatcaccactgatcccacagaaatacaaactaccatcagagaatgctataaacacttctccacaaataaactaggaaatctagaaaaaatggataaattcctggacacatataccctctcaagactaaacaaggaagaagttgaatctctgaatacatcaataacagcttctgaaactgaggcaataattaacagcctactagccaaaaagtccagaaccagacagattaacagccgaattctaccagaggtacaaagaggagctggtaccattccatctgaaactattccaatcaatagaaaagagaggctcctccgtaactcattttatgaggccagcatcatcctgataccaaagcctggcagagacacaacaaaaaaagagaattttaggttaatatccctgatgaacattgatgcaaaaatcctcaataaaatagtggcaaaccgaatccggcagcacatcaaaaagcttatccaccacgatcaagttggcttcatcccggggatgcaagtctggttcaatatacacaaatcaataaatgtaatccatcacattaacagaaccagtgacaaaaaccacatgattatctcaatagatgcagaaaaggcctttgacaaaattcaacagcccttcatgctaaaaactctcaataaactaggtattgatggaatatatctcaaaataataagaactatttatgacaaacccacagccaatatcatactgaatgggcaaaaactggaagcattccttttcaaaactggcacaagacagggatgccctctctcaccacacctattcaacatggtgttggaagttctggccagggcaatcagggaggacaaagaaataaagggtattcaactggcaaaaggggaagtcaaattgtccctgtttgcagatgacatgattgtatatttagaaaaccccatcatctcagcccaaaatctccttaagctgataagcaacttcagcaaagtctcaggatacaaaatcagtgtgcaaaaatcacaaaaattcctatacaccaattacagacaaacagccaaatcatgagtgaactcccattcacaactgctataaagagaataaaatatctaggaatacaactgacaaggaatgtgaaggacctcttcaaggagaactacaaactactgctcaatgaaataaagaggacacaaacaaatggaagaacattccatgctcatggataggaagaatcaatatcatgaaaatggccatactgccgaagggaatttatacattcagtgccatccccatcaagctaccaatgactttcttcacagaattggaaaaaactactttaaaattcatatggaaccaaaaaagagcccacatagccaagacaatcctaagccaaaagaacaaagctggaggcatcacgctacctgacttcaaactacactacaaggctacagtaaccaaaacagcatggtactggtaccaaaactgatatatataccaatggaacagaacagagccctcagaaataacaccacacatgtacaaccacctgatctttgacaaatctgacaaaaacaagaaatggggaaaggattctttatttaataaatggtgctgggaaaactggccagccatatgtagaaagctgaaactggatcccttccttacaccttacacaaaaattaattcaagatggattaaatacttaaatgtaagatctaaaaccataaaaaccctagaagaaaacctaggcaataccattcaggacataggcatgggcaaatacttcatgtctataacaacaaaagcaatggcaaaaaagccataattgacaaattggatctaattaaactaaagagcttctgcacagcaaaagaaactaccattggagtgaacaggcaacctacagaatgggagaaaatttttgcaatctacccatctgacaaagggctaatatccagaatctacaaggaacttaaatttacaagaaaaaaaggaacaaccccatcaaaaagtgggcaaaggatatgaacggatgcttctcaaaagaagacatttatgcagccaacagacacatgaaaagacgctcatcatcactggtcatcagagaaatgcaaatcaaggccacaattagataccatctcatgccagttagaatggcaatcattagaaagtaaggaaacaactgacgctggagaggatgtggagaaacgggaatgcttttacactgttgatgggagtgtaaattagttcaaccattgtggaagacagtgtgtcaattcctcaaggatctagaactagaattaccatttgacccagtgatcccattactaggtatatacccaacggattataaatcatgctactataaagacacatgcacacgtatgtttattgtggcactagtcacaatagcaaagacatggaaccaacctaaatgtccctcaatgatagactggattaagaaaatgtggcacgtatacaccatggaatactatgcagttataaaaaaggatgagttcatgttttttgcagggacatggatgaagctggaaaccattgttctcagcaaactatcacaaggacagaaaaccaaacactgcatgttctcactcataggtgggaattgaaagtgagaacacttggacacagggcgggaaacatcacacactggggcctgttggggggcggggggctgggggagggatagcattaggagaaatacctaatgtaaatgaccagttgatgggtgcagcaaaccaacatggcacatgtatacctgtgtaacaaagctgcacattgtgcacatgtaccctaaaacttaaagtataatgataaaaaaagaaattgatctatttcatctaggctattaaattttggggcacatagttgtttatagtatcctttattaccattttaatgtccgtgggatctatgatgtaccctctttcaattctgatattagtagtttgtgtcttctctctcttttctattttcttagtctgtctggaggcttactgattacgttgatcttttctaatatcaatttgaattaaaaaacccaccagttatttacattgtctatctctattgatttcctgtttccaattttattgatctctgccccaatcattattatttattttcttctgcttactttaatcttactcatctttttgtagtttcctaaggtggaaagctttgactattgagttttagatcactgctcttttctaatagatgcattcaatgctataaatttctctctatgcactgctgtgcccttacaaattttcatacttttttttcattttttattcagcttaaaaagtttacattcctcctgagatttcttctttatttcatttgttatttagaagtgtattgtttaatttttaagtattttgggattttctggctactttctggttattgatttctagtttaattccattgtggtatgagggcaactattgcataatttctatttttttttttttacttttaaagaatttttttaaaaaatattttaaatgttatatttgtttaaatttgttaaattgtgctttatggcctagaatttgttccctctttgtgaatgttccatatgagcttgagaagaatgtatattatgctgttgttggataaagtagttatttcaattatatccaggtgattgatggttctgctgagtttgactatgtccttattgattttctgcctgatgcatatgtccatgtctaattaaggggtattaaagtattcaattatgtaatagtgaatttgtctatttcactttgcaaatctatcatgtattttgagcctcacatattttgatcctctgtagttaggtgcatacatattaagggttgttttgtcatcttggagtattagtcaccctatcattatgtaatgccattctttatcccttataatttgtcactgataactttccttgctctgaagactgttctgtctgtggttaataatgctacttctactttctttgatttgtgtttgcatggtgtatattcctccatccctttattcttaatctatacgtctttatctttatagtgaattacttgtataaacgtaaagttgggtcttgttttgatcccctctgacaatcaatctctgtcttttaattggtgcatttagaccactgactttcaaagtaattattgatatagttggattaataactaccatatgtgttacattttctatttgttaaccttgctctttgtttctatttttgtctttcactttttccctgccttttcttggttttaatcaattttctcacatttattcacatatccattatacttattttaaaactcttttatttatttatttatttttgagacagagtctcactctatcgctcaggctggagtgcagtggtgggatctcggctcactgcaacctccgcctaccgggttcaagtgattctcctgcctcagtctcctgagtagctgggattacaggtgtgcaccaccacgcctggctcatttttgtatttttagtacagacagggtttcaccatattggtcaggctggtcttgaactcctgaccttgtgatctgcccacctcagccttccaaagtgctgggattacaggcatgagccaacgtgcccagccttaaaactctttaagtgttttccttggagtttgcactgcacatttacaagttatccaagtccattttcaactaatactgtatcacgtcacaaatagtgtgattaccttataataacaagatattcttaatttcttctccctgtaccttttatcattgctgtcattcatatctcaaatatttatgtatcagcatacataagcatatatgtacacataaagcatgtacataaacatacataatcaaatacactgctgctattatcatcttgaacaaactgttatctgatagatcaattaagaataagaaaaataaaagtttttaatttaacgttcacttaattccctttctgatgctcttcttttctttatatagatctgagtttctgacctgtacattttcattctctctgaggaatgtctttcaacatttcttgcaaggtaagtctattggaaacaaattccctcaattctttatttctatttcacttttgatgaaaatttttcagggtaaggaattctaggttgttgtttctttttttccccctcccaacactaaatatttcactctactctcttcttacttgtgtgtttcctgaagagaagttatatgtaattcttatctttgctcctctgtatgtaaaggttgttttatttttcacctttgtcttttttcaaggttttttctttgatattctgaaatttaaatataatatgcctatgtatagtttttgttttgttctgtttgaatttacctggcttgatattttctaagcttactggatttgtgcttcagtgtctgactttaattttgggaaatttctgtcattattgcttcaaatattgtttctctttctttcttgtttgcattttcattgcgcatatgtcacacctatgtagttttttcataattctggaatattatgttctattttattaatttttttctttgttttacagtttttgaagctttttttgttatatccacaggctcagagattctttccttagctccgtccagtctactaaggagcccatcaaaggcattattcatttctgttacagtgtctttgacttctaacatttctttttggttctttcttagaatttccatttgtcagtttacattatatgttggttctcacatgtcagatttttcacccttagcatgttattaacatatataaatatatataggtgtatatttttaattccttatttggttattccaatacttttgccacatctgacactagtctgatgattgttaaatctcttcaaactatagttttttttttttaccttttagtatgacttgtaatattacgttgaaagatagacatgatatactaggttaaaggaactctagtaaataggcatttagtggtgtgatggtatattttaagggaaggggaagcattatatactcctatgattatgtctcagacttctgatgaacttgtattcctgaactttgaactccaccagcgcttctaagttttctttctttttttgtgcatgtgtgtttataaaaaattagtagttttttctttttttttcttttttaaaatttttttaattattattatactttaagttttagggtacatgtgcacaatgtgcaggttagttacatatgtatacatgtgccatgctggtgtgctgcacccattaactcgtcatttagcattaggtatatctcctaatgttatccctcccccctccctccaccccacaacagtccccagagtgtgatgttccccttcctgtgtccatgtgttctcattgttcaattcccgtctatgagtgagaacatgagttgtttggttttttgtccttgcgatagtttactgagaatgatgctttccaatttcatccatgtccctacaaaggacatgaactaatcattttttatggctgcattgtattccatggtgtatatgtgccacattttcttaatccagtctatcattgttggacatttggcttggttccaagtctttgctattgtgaatagtgccacaataaacatacatgtgcatgtgtctttatagcagcatgatttatagtcctttgggtatatacccagtaatgggatggctgggtcaaatggtatttccagttctagatccctgaggaatcgccacactgacttccacagtggttgaactagtttacagtcccaccaaaagtgtaaaagtgttcctatttctcctgttgtttcctgactttttaatgattgccattctaactggtgtgagatggtatcttattgtggttttgatttgcatttctctgatggccagggatgatgagcattttttcatgtgtcttttggctgcataaatgtcttcttttgagaagtgtctcttcatatcctttgcccactttttgatggggttgtttgtttttttcttgtaaatttgtttgagttcatcatagattctggatattagccctttgtcagatgagtaagttgtgaaaattttctcccattttgtaggttgcctgttcactctgatggtagtttcttttgctgtgcagaagctctttagtttaattagatcccatttgtcaattttggcttttgttgccattgcttttggtgttttagacatgaagtccttgcccatgcctatgtcccgaatggtaatgcctaggtttttttctagggtttttatggttttaggtctgacatttaaatttttaatccatcttgaattaatttttgtataaggtgtaaggaagggatccagtttcagctttctacatatggctagccagttttcccagcaccatttattacatagggaatcctttccccattgcttctttttctgaggttagtctaagatcagatagttgtagatatgtggcattatttctgagggctctgttctgttccattgatctatatctctgttttggtaccactaccatgctgttttggttactgtagccttgtagtgtagtttgaagtcaggtagcgtgatgcctccagctttgttcttttggcttaggattgacttggcaatgtgggctcttttttggttccatatgaactttaaagtagttttttccaattctgtgaagaaagtcattggtagcttgatggggatggcattgaatctataaattaccttgggcattatagccattttcacgatattgattcttcctacccatgagcatggaatgttcttccatttgtttgtatcctcttttatttcatggagcagtggtttgtagttctccttgaagaggtccttcacgtcccttgtaagttggattcctaagtatttgattctctttgaagcaattgtgaatgggagttcactcatgatttggctctctgtttgtctgttattggtgtataagaatgcttgtgatttttatacattgatttttgtatcctgagactttactgaagttgcttatcagcttaaggagattttgggctgagacaatggcgttctctagatatacaatcatgtcgtctgcaaacagggacagtttgacttcctcttttcctaattgaataccctttatttccttctcctgcgtaattgccctggccagaacttccaacactatgttgaataggagtggtgagagagggcacccctgtcttgtgccagttttcaaagggaatgcttccagtttttgcccattcagtatgatattggctgtgggtttgtcatagatagctcttattattttgagatacatcccatcaatacctaacaaactgtctctcagaccacagtgcaatcaaactagaactcaggattaagaaactcactcaaaaatgctcaactacatgaaaactgaacaacctgctcttgaatgactactggatacataacgaaatgaaggcagaaataaagatgttctttgaaaccaacgagaacaaagacacaacataccagaacctgtgggacacattcaaagcagtgtgtagagggaaatttatagcactaaatgcccacaagagaaagcaggaaagatccaaaattgacaccctaacatcacaattaaaagaactagaaaagcaagagcaaacacattcaaaagctagcagaaggcaagaaataactaaaatgagagcagaactgaaggaaatagagacaaaaaaaaacccttcaaaaaattaatgaatccaggagctggttttttgaaaggatcaacaaaattgatagaccgctagcaagactaataaagaaaaaaagagagaagtatcaaatagacacaataaaaaatgataaaggggatatcaccaccgatcccacagaaatacaaactaccatcagagaatactacaaacacctctacgcaaataaactggaaaatctagaagaaacggataaattcctcgacacatacattctcccaagacttaaccaggaagaagttgaatctctgaatagaccaataacaggctctgcaattgtggcaataatcaatagcttaccaaccaaaaagagtccaggaccagatggattcacagccgaattctaccagaggtacaaggaggaactggtaccattcctctgaaactattccagtcaatagaaaaagagggaatcctccctaactcattttatgaggccagcatcatcctgataccaaagcctggcagagacacaacaaaaaaagagaattttagaccaatatacttgatgaacattgatgcaaaaatcctcaataaaatattggcaaaccgaatccggcagcacatcaaaaagcttatccaccatgatcaagtgggcttcatccctgggatgaaagcctggttcaatatatgcaaatcaataaatgtaatccagcatataaacagaaccaaagacaaaaaccacatgattatctcaatagatgcagaaaaggcctttgacaaaattcaacaacgcttcatgctaaaaactctcactaaattaggtattgatgggatgtatctaagttttctttcttgcttaggtaggacaggatggctacagtggactgaagttgggtatttcctttcctcctggtatgttagactctgataaaactccaccatgttagcctgtagtaaaatagtttatcatgaggacaggccttgttaagaagaacagaatgctctgttgtattttttaaatggttactttttccctccctcttctggaagcatacgagaatttttctccaatatttattgtgaggacttggtagagtttctagaggtaaaactcacaaaagggagagggcacctttgtgactgcgtccttctggagtttttaacactcagagttgtccatagtcaacctccaggtatttgtcaattagagttcaagttttcctatcccggcactggttctcatggacatttcttctgtgtagttcctgcttaataagttgtgattctccacttctatttgtctgtctctacaattttgggggcagtggtttgccctgtgatctcacttctctgacagatctaagaagagctgttaatttttcagtttgttcagctttttacttattgttatgatgtagtgctgactaccaaactcctttccagtgttcttttcattattgctacaaatcttcttggagtgtagatttcatcattacctattttatctgtgtgtgtgtgttcaaattagcaataaaaaatttgctatgtttggaacaaacaggtttggttttgttttgttttgagatggaatctcgctctctcgccagactggagtgctccagttgcaacctaaatttttaaagcttttcacaccttcatgaaaggctttcactgtgttcctggttcatcatgatgttgcctagatcaccatggaaggatattttccatggaccagagctgacaacagaagcaagaatgaaccaaacacctttcagttgcccaagagactagactgtattagaaagttccacattattatatgttttttaattggatgtgaaagcatatcagaagagattgaaaatcatcccaagttgatttaaaaataacaaagcctcaagaatagtcaattaatggtgagttgtttattcttttcaattgctttaatcattgtagaaaagaaaagcaatttttaaagaaaaaaataacgtttgagaaatgataaatatggggaaaaaataaaaagaagaaactaaaatgtattttgttatccaagacctggggagagaagctattgactgctgagttcaattaagtttcagagaagaaagtcagaattagcaaatccttaacaggccactctggcaggaaattaatttttgattaaataacatgattaaagagtgagggagtttaattcatagggatatattggatgacttccaaatatattacttctttctaataattaaagagtaacttaaaatggcattaaatcatattttaaacagcataataataacaacttaagattggcagcagcagctagtaatctctgtttaatacttaaatactaggttgggtttggcaatgtaatcatactagtgattttaaaaaaacttttgttcgggctgggcgcagtggctcacgcctgtaattccagcactttgggaggctgaggcgggcggatcatgaggtcaagagattgagaccatcctggccaacatctctactaaaaatagaaaaattagctggatgtggtggcaaacgtctgtagtcccagctacttgggaggctgaggcaggagaatggctggaacccgggaggcagaggttgtagtgagccgagattgtgccactacactccagcctggctacagagtgagactccttctcaaaaaaaaaaaaaaaaaattgatatgtttagagttggtatgcattctttcctctggcattgtccttagtcatactattgcttgtataataaatataaattttaagtctatttaaagtgttttttgtaaatctcttcttaaagtttaattaagtaaaattgaattccagaaattaatcctatcttaattctttttgccaatcaataattagtaatgaaactcatattccttatttaaaatgacaaataagtgttgaaggacaaatgagagcatctacaccaaagtctgcaaatatgatattgtaattcataagtaagcagtagattcaaacttttttgggttaatagcatgaatcataacctcaaaaaaattggcataatataacccaaacatcataatattaaggtgttcagggagcatctcatgggactccatgttaagaccactttaaaacaagcatttccactcttgtcctctaagacaggtgacagaagtaagaatattggaaatatgttaaagacaaagtgtaccacaaaaattataacagaaatatactcttaatatctttaaaatttaaagataatcaaaatcataagataaagactccaataggtaagtgatgactctgatttcataataaataaaagaagaaacagtgaagtaaaacatggaaaaatgtttattttttataccggggctgggactacggtaaagcaagcaagatacctaggacacaaaatataaaaagggagtctctctctaggtcatgtttgttcagagtcggcacacaaggatgagtacctccttacattttgccccttcgatgcttcacttgcgtcactctagtcccagctctgctttgcactaatcaaagaaattcagattacaggtgggctaatcagtctacccctactcctggtattcatggctttgtatatggtattcataaacacatgccattccatgatcattagaatatgcctaaagcgatggcatgtgataattaggctactgccttactctcacttcttggggaagctctcactctgagggaagccagatgccgttttgtaaggtcacacaaacagctctatgcagaagtctaagagataaggaagtgaagtctcttgccaacagccatgaaggagccattgtggaagcagatattttagctgctgtcatgctttcagataactgtagcctcagccaacatcttaattacaacctcattaagaaaccctaagccgtaattttttattttggctactcttgaattcctaatgcaaataagcttatagataataaatgcttatcattttaagcattaagccattctatcatttgtacgtaaagagaaagaaattctgtgttggtgttacagacttgtcttagcacaatggttacaaatacagacccttgagccaaactgtctcactttgaattttggatttgttgcttattagccgtgtgtcctgtggaaaatttctgaacttatttgtattttacattcttcatctatctgtaattaggaaaaataatagtacctctgcttcaggactgatgggaaaaattaagaaagtgaatgcatataaagtatctaccaattaatatacattatacgtgtgttttatacagttaatttttctgtgcttatttctcatgcagacatgtgtattgtcaccaaagagtgaagcacagctttctttatgggcaaatatatttcactaataccttcttcactaatacctcagatagatgtgcatggctcttgaaaaagtattttgtatattcagaggaggagaagtgggatttctcccactttggttttaggtggggaaaattttctagattaagtacaggaaaattttattttatggttatttccttcttgccatattagaaatgctcccagttttattgtccaaatatttaatgcctacaacatttgccatgcacttccctggaaatgaatcttttcttctctcacattcatttttcgtgtgagtgtgtgtgacctacatgcattcttttctctttaaaggaatgtttttactgctctgcagacatcaagtagcctgagctggaggttaccatggtgatatggtcatacacgatgacttcaagtctatatcttgctgagtggttttcagggagaattgaggattgttgtcttttgctgatagactctacttaaacttgaccttctctgccatttcttctaagaataattaaataatcttggtgttagtggatgtccaggatggctgttttcaaaagtataaagtaggtaacatttataatctttacactttccttttcttgtaacctttccccagcaacagtattattcattttctctaggcatttgatgacctaatattacctcagacctttttaacaagaaatatgtgaatctattaatcccatttatactgtgatttaaaaatcaaaatcatatcactatatttgagttgcattatgtagactcacctcagaaatcatgactgtacagtgagttactttagagaaaaaaaatttgggggtaagtgacactggtggtagaaatctctgtgtcaaaaataggcaataaattatttttagtttacaactaccatcatgcattgcttgatgacagatacacagcctgagaaatgtgttgttaggtgatctagtcatcatcctaacaaaataaagtgcacttacaaaaacctagatagtctaggctatgctacacacctaggctattaggcatagcctatttctcctaggttacaaatctgtacaccatgtcactctactgaacactgtaggcagatggaacacagtagtaagaatttatgtgtctaaacatatctaaacatacaaaaggtctggtaagaatatgttgttacaatcttatgggaccactgttgtacatgctgtatatatggtctgtcattgatcaaaatgtcattatgcaatgcttgactgtataaaacatataactagttttcaaattattcccagtatatacatatatatatcagaacaaccaaatatatccatttctactcaaaacagaacagttttttctctgtcccaaacacttactcgacttgaaaatggcttcagtttaattatcttttcttagtaagtattgtttacattaaaacttttttgaattgtctaacgtagttctttagagtttctcaaagttttgttaccagattatatatcaagttgggaatcaaatttttttaaaaatgcaattacatttcaataatgaagaaaacagaaataaatattgccaataattatcttgtaacataaatagatttgaatattacaatagttcttattatgtgtatcagtcatttttctctcatctaacatttaccaccaagtatttacttagcttttcatgtgttcatttgtgtcctcatataaaggcacaacttcttgattttaggaatcatgcctaatattttgttgtttgtttccagataacacttaattagcaatttagtaaacattaattgaatggaaaatttgtttagaaacaattaaagtatgaaaagtttcagggaaagtgatttctcatctttttttttttgttagtttggcactagttcttcaagttttatttcttctttggtaaagagggataatgtgtttatttatgtacttaacaaattctaactgagtactagggtctgttctttgagatgtgaacctaggtcagaagaactctacttttatgaagcttgcattagtgagaggaaacaaacaaataaataagcacttacacaatatataattccaatgaatataaagaacttcatgatacagtgactgtggagctatgttagtagactcatcctctctgaagaggtgacgaagaaccagaaatagctaggtgcatgcaaaccagaagcagtattagttagggcaaacttaagtatgttgagttttaagataaaaagaaggccaatgttgctgaagtataaaggacaactaattagagaagaggctaattagataatgtcaaagaaagagactatggagtgttctttgtaaactggggtaaagaatttggatttttttttaaagtacaatgggaatccattggaagtttttaaggaagaatgaaacaaaatctaatttacatttttaacagtttttaaagtactaggttatgaggtagggagaaattggacagctaagtctgaaatatttacttgacattcatgtccagatatcaggtggaaagttgttgtctaggactccagacaggttctaggtcagggctggagcccttgatatttagttggtatttaaagccatgaatcctatgagataagctagaaatattaccttgtgggaacattgagagtgacttaaaacagagcctcaaagcatccagcttttagcagtttagtagagaagaaaagatcataaaggagcagtgtagcaagacagagcaaagaataagataagaggcaagaggagagaataaagttaatacggtaggcagacagaagcataagtaagatataaacagaaaggtgaacatgagatttggtttcacagaagttgttggtggctttgacataaacaataccaaatggagtaatgaggacaaaaccagactagagtgagttttcctatggcactatgaaaacaatgaaaagatcaaaatgtgatgtgtgcctcataacgtatgtagtagtaataggactgctaattgaataaaaacagcaattatgtaatgggtgttagctttccatctgacattttgctaagcacttttcatgtattattttatttaatccttataatagcactttaaaatcaacattattatgtatcatcattttagagataaggaaatagacatctttccaaggtcacattgctttgtcacaagcataagagttacagaatcagtcttaatctaaagaaataaaaggagcagataattattgtgtatatttattttttataaaattttgttttttaaagtagcatttcacttatgctaagttctgtttttagagtttatttgcataattgaatcacagaaaagtgataatctcctcagcaagataaacaattgatggctaccgaatgaatgtgatgtttctgattttttagttctaaaattcaaacctggaggacttaaaaatatctctaaaatgtatttgtgtcaaaacttacagacataaagaatgtatttcggactgagagaaaaagtataaatagcttcttacttaattcctttttttctgagaattacagtaaaatagctagaatcatctatatttaaccagttaagattcttgaaatcaacatgagtgattttaagaataatcaggctaaaaacacttataacttgtaaaaaatgtatcttaaaatggaagtgtgctgtaataatagattgtgttgtgctaattaatgtaaaataattggctacttatactaatttcagaaagattatagaatgaaacattaaaacaaacacaatagaaaatgtagtcttttaaaaaataatataggattgagggcgacatgaaagaaaataagaaagtattgacagatttgactaaacaattttcttcttaaatcaccatacaaaagttaaaaaataagtgaataactggggaaaatgtgtatagcatatataaaagacaaatggatattatctacatgaatagcctttgcaaataaatgaaagaaaaatgagcagtccaacaaaaataaagcacaaatatgaacaggcaattcacagtaggcatgatgtccaaagaacttattaaaagatgttcaatctcagcaataatgcaaaggatatatttgaaacaatgttgaagtagttgactccactccgtttaacaaaaagaaagaaaaggaaattactaataataactagtatttgccagggtgtggggacacagacactttcaaactttgtaagcaggagtggcaaacatttgttttaggggaattttcagaaaaatctccaattaatgaaagctgagtaatttcttttcttctaatgggactggataatacgagtcctacagatatcaattgtaaatgaggtattccagttgtcaccggaatggagtgcttcttctccaaggtagaggttctcactctggctgcacatgagaaacacatggatatcatttagacaataccaacgctggatacctccaaccaatcagctcaaaatctctggaactggagcatagatattgctaatttttagcatactcccaggggattctaacgagcacaaggttgagatctctgtcattattatcctcacctttcctattagggagagtaaaaaatgtatctaaagcccattcttgagcctctagtgttcagcaaacttgctaactaaacttaatggagagaaaagtattttatttctcagctgagcatgtataaagagattttgcttaaatagaggcctacagggaaaaaccctgagaggctggctacatttcattgttgacattgatctctgtccagggaaaatgatcatggaccaaagcatctctccttccttccttcctttttttttttttttttttttagatggagtctcactctatcaccaggctggagtgcagtgacgccatctcgactcactgcagcctccgcctcctgggttacagccattctcctgccccagcctcccaagcagctgggaccacaggcatgtaccaccatgcctaactaatttttgtatttttagtagagacagggtttcactatgttggccaggatggtcttgatctcttgacatcgtggtccacccgcctcagcctcccaaagtgctggaattacaggtgtgagccaccatgcccggccccttatttttccttatttaccttttaatatgtctggaatttaggactcttcaaaggagtacactctcaccttcagggacaagactaaaatcagagtggataatattcaaacattttaggtactctatgtttaatcaggactaaaaggcagatgaaggcatttaatttcattttgttcctctgtgccttgcaatttccttttcattgcaattatgagaatcacaatatgatccatctgagagagaggctgactcaattatggcagtctccaaaacaatatagttacagtctatttgaagacattttggcaataactgctttaaaattttatataccctttatgctagcatttccactcctagaaatttattctacagacctctcacaattgaaaagaattcttgttcaaggcaattcactgcagcattgcttgcaataccagaacttggaaagaaattatacagctattaaaaataatgagaaagatgtccatgtattgattttgaaagatatccaggctatgttgaccaatgaaaagaataagtacatttttgtgatttctaaagtatcaatttaattatgttctcccaactcttttcatgaatggtttcaggttatagttggtcaaaagagtaatttgcttgagatctggaaagcagaagcaagcaatggcttcattttcttatggtcatcatggttatctgaaatgacagacaaatatagaggtgcctgttgggctttagcttttccctatgcatctcaactatgtgtcaagctcttcttttggactcctggccttgctgaccgtcagtctcagacccagacaagaggtacacaaatgctggcaagtttctgcttggctttgttccagtgtctgtctagttcttctctccaattgcaggccctagtgaccatccgtggcccgaagttcatcaccagataattacatgggaacccataaagataacaccttcctgtaggtatctccacccactcctcttttatgatccttttttggtggttgaatctatgtggcatctcagattgactgtggatgacacctctgatcctccaacctcccttttcagactttaattttcaagcttctcccacaattgtttaaggtctcattcctacaaaaaaaaattcttattctgtaactattctacaacttattctataactgtaatattaactattagtgattcactgattgtgtcctgactgacacagttattgggactggggtatataatctccatatgtagctttcaataattcctccctttgttgtacatgcacagactcgaagaaatttggtctcctttctctttccttgagcctgcgctggactatcacttgcttaaactaattgaatacagtggaagtaatattcttggatttctactctagaccttaaaagatactacaacttttattccttcttcttggatctcagcagccatgatgtaaagaagtccaggctagatgatttgataattagaagtaatatagaaagacacctgatgcatgagaaatccacttagtacatttggttagtacgttgggacctcccagctggctgcagctagctacatatgagtgaatccagctacaatcatgtatagtagaataaccactcaactgagcattgcctgagttcttgatccatagtcatgaaaaataacaaatcattgttaaattaatttttaagccactacattttcagttggtttgttacacaaccatagatacatccattcatacactcattcatccagcacctataacatcaggcatcattgtatatactgagcacacagtgctgaacgagatagataaggtccttttgttttgcagattacattttagtggagataagtaaagaaaattatttcaggcagtgaaaaggaatttaaatttttgttgagctagagttggttgagtggaaaagaccatctttgattaatgctgaaggaagacttctctgaggagatgccctctgagttgagatctggagaataaggctctcattctgcaatgaattggaaggtttcagacagagaaaattgcaaagtaaatgggaatatttcccgaacagaagtaaaaatcatatggctgatatgcagtgaggaaggggagatgaagttctttagtaatctctttaacatcttattatccatattaaaatgctttgattttattctaaagtttaaaactattaggcacactatagacttatttaaaacatattcaagcatatgaataaagtgagttggaatatgtaacaaattcttgacagtagttgtttctgaggggcagttttaagaggaatttttacttttaaaggcatattttcatgatgtttcaatgttgtataaatgtggaacagactttttcctcaaaattttattctctccttttatattaataggattatcatcatgaacatgttgagactatatatttctaactcccttgtggacaaagtatagttatgcagctaaatatgtgaatggaaatgaaatgtgttattctcatctgaggcttttacagagtgagtaggtctcttccatgatttcttttccctagttttggctgcttgcggaggctgatgagaatgataaagccataagatgggaggaaattcagttcagatttattgcacggaggagagccacgctgatatatatgagccaaaaataaatgttagtcccctgaaattttggaatttgttaccatagcttagtctaacctaactaagacaatgaatatatgcattacttttgtaatctgaagaaaaaaagattaaaaagatttcatttaatgtaataatttctattgtacttcaagtcaagcctgaagccctcaaaagcttttctgcaaataggtcaaagaattagttggagtactagagcaagcatttaagcgtttttgtgaaacaatatttaatgctgctggtgactctgatcttacagtctatagtagatacataaggattcttgatattcctactccattaccttatatgtcaagaagcttctacttgtttgtatcaaggacttaggaagtagcattagattataccttttcaaaccagatttcactcagtgtatcaccaaaatgtggtaaaatatacatttgttacattgtcagcttttgagaccactattagattaaactgagagaaacgctcttactattcaaattaagtaacttgtgctctaaagatcaaacatttctaactatattactatgaacctggtactatctctatttacaacctcttattagcatctgtagcatctatgcagagaacttgaggacataatctaagtctgcatgcccatttagaaaacaatttatttaaggtcaggaaaattgtaaagataattcaaaaacaattctagaggtcaggcaaaacttgaagtttattctccctttaatttatagtctttctatcaggcccacctaaaatgtgaaagccttttctaacacctgtctgattgcctttggtaaagtgcaacaagctatgcctctttgttcattgtatggaattaaaaatatacatcccctattgctaacctaatatttctgaaaatcacctaatctagctctgttacttgttaaaaaaatgtaaacattgctgtgttgttacctctaatattaaaaacttcattttaaaaatcccgacaatttagcaaattgttgtatatctatataatgaaacataaacaccatgagaaatgtatagtttgaacactataacaacctagaaatattttgtattaacttaaaataaccaatagactaaaaattatatttgcaatgctgtgagtaaaactatgtataatattgtaatcatgtggctaaagagaagaaaacataatttaaaggcttgatttattaggatggcaaaactgtgggttgacatttgttcctttttatgttttattaatcgtgctataatgtttatgcattaggtaattcatttacgcaaagtcattcttcatttaatcatacagaattattaaggacctactttatcctaggttcttttttggtagttgggaatataatggttcagaagactaacaaactcactgcattaataaaacttgcattctattgagggagacatagagtcaacaaatatgtgacatagcttgctgtataatttgggtcttctagaaagaacacactaaaatcgagggtaaaattttaaaattttgttggagtgcaaaccagtgaaaccaatgaaggggaaaaacaggcagtgggaatgaacagaggtcagttatgatgctgtaattgacaatgtatctggcagtccacagaagcactccagaacaaaaaaatatccattagaaatggctaggtctctgtagtaacacatttctcagccattagctgatgtcacacagaacagagtatcacctatactcgtggagttaatggctgagaactgtcagaaaacgccattgctcatttctaggcagcagattatttcttggaagtgggtctgagagcaacatgtctttgttcactacatttgttatagatgaaaataaggtaagaagagaaagtgatatgggaagtttattttaaataagatgatgcaaaaggccattgataatatgatagttgagcagagacttggaagttagctttagtccacatgaaaatctgggcaaggtcattctgggagaggagacagaaaataagaatgtgataacctgggaacaagccatggctgaagtgaagaaaattagtagaaagagataggagatgagattgtgaagatagactaggaacataagggctacggttaggatattttctgagtattatggatggcccatggaaactttgaactagagagtatcataatctgttgtacatttttataaaattcacactggaggattgtgcctttcagtagagtgttagtggtagggccatcagaagaggtaggaatcagacatatattcaaaccatacctttctgatgagttggatatagaaaatgagggaaagagagaagtaaaggatggttccagagcttatgacctgaggaaatgtacagataaaggggaagaattgagtgaggaacaggtttgtgatcctgatggggagatagaattctgttttggatatgttaaatttaaggtgatcataagattctttgttgacatgtaaacagttaatgtgatatgggtttcttaaaagtcacaggacaagtagagtaacaattcagtttaggactcactaatgtacagatgacatttattgctacagatttggatgagatcacctataaaagtgagtataaatagagaagtatatccttgattaagccctaaggcactccaaaatctaaaagtaggtatgaagaggaggaggtagcaaaggagatggtgaaggagcagtcagaaaggcaggaagaacattagaagatgtggtgtcctggaaagccaactattaaaataaaaggaggagagggaataatcatcaatgtcaaatgcttctaataagtcatctaagatgaggacttggtgttgacttttggaaacggtaaaatggaagtcaatattgataggagaaatttcattggaatagaagggatgaaagcctttttggaaagcaagggtaaggaaaagggaattcgagcctgagaaaagagaggcaatataagtgtctgtgtgtatgtgtgagtgtgtttacattttatccctagaataggttgatttttaaaaggtacaatatattttgttttttgtactatattcatcatattcatatatcatacagatgagggatctgagttatagtcgagagagctagtaaagctagttgaattttatggtgctatagttagaatatagatagtggtaacctctttataaacactgtgttttggaaaaagagttcaaaaagttttggtaatacagaagtttctaccttcgatacctagagctaaatatatcaataatcaatataaattaaaaacatcttttgagtttggagcaacatccaatttgctttggatctttgcatctacaattaaaccagtaaaggagaaattgattggtagttatgttatagtaattgctttgagttcatacataccattattattagatggtttccatacaaattatctcactttatatgaaaaatgatcctatgaatgtcctttagagatgagaatactgaggctctgagctttaggtaacttgtgcaaaatcacgtagctaatttcacacatgaaatttgattgcaagtctgacagttagctctagcttattctagtatgcagtgctacttattgctttaaaattaccaaacagcttaaaagaggcaattatttatgctctgtgagacatcaatcaaaacttctatgtacttcagaatggattccaatttaataattaaaaatccaggaattatacatgtaaattgaagtcaaattgtttttcaagatagagggtcgttggctaaccaactacataacagttgatttaattagtagaaatgaatatcatgttaaaaatcttttcaggattatttatattctatatatgtttgtatgtttttagcatagaaacatacttgatgtttccttttttgaagacattcaattatatagctgttaacatctttaaaaccaatatatgtacaatatacaattatgaaattgtatataattttttatcttccctgtctggggaagaatagatttgaaattggtatttgaaatattgatgataatggaacatgttaacatatttgatattgatggataatgcaaagattaacatatttatttatgacagtctataaaatagtgatctgaatctacactgtaggacctattatgaatatactgttaaactgataatgcattccagagctatagcaactattacctaggtaaccacaaaaatatatcatcttgaattgaatttattaaatgaaaacttttttttttttggattcggtctattgccatgtgtaaaataagaacaaaatttaaagtgatttagaattgtgtaaaatagattttaaactacatttttacatcattagaaaagataaaataattacaacacttgtttcaattaaatatttcaaacactatatagtgatgatttacactttactgtacgttttcccataaagacttaaatttgttttacattctgaaatttgttgtgtgaattagctattggtagacatttttatttatacctactttcattcagtgagaaaaaaagcaactagaaaactttttaaaaatttcaggttagacaaatatacatcttaattcccatttctctttttttattagttattttagcatgattatgttgcttcaatattgaggcaaactccatctaggctcacctgccctgtcttcggtacactgatagccctatttccaagttttccaagttaagtgtggtcatgtgagtaaattccgtctaaaaaatacgtgaatggaaataatgtgtgccacttctgaacctactcctggctatgttccataacactctcctctgcctattagacagaggcaaccttaatgtggcagtgacccaaaactcatacaggtaaagggaaggcactaaaaaatggcgagagaatgtgaagaaaggaacctgggtttttgagtgaatgaaaatgaaataggctgcatgaaataaggcagcctattaatccagactgctcactttagaccatcaaatgagagggaaataaatttgtgtcttctttaagctgcttaattatgctaattttctttattacagcagcgtagcctaaataatgcacaccgatgaggccaggttcaataggataagaacgctttctcaaattcacaggttcaagttaatccatttatgcctgggtcatattcttccccataatgacatcacttatactgataggatctttttcactctccctagctgttttatcactgagactatatttggctgtacctctaatcaatgcttaatttgtttgagtttttttttttttttcactataagtggggctggggatgatgtctattttcaggatgaccaggagggcaatatgtatattgcaattttgcaagaaacatttaattcgacttgtttggtttccttgtgtgttcttggcctattcttgtgatgaaaataatccagaatattatgtagtatacttgttttctctgttttatttttctatctctggtgattcacattgattctgatgaaaacaccaacctaatgacttgatgcttttttatatataccagtgaatagtgtgtatttttctatatgtatttatattacatattggtatgatttgtctctgtgtcaccacccaaatctcatctcaaattgttatccccacaagtcaaaggacggacctggtgggaggtgattggatcatgagggtggtttcccccatgctattctcctcacagtgagtgagttattttgagagctgacggttttaaagtgtagcacttctcctttagccttctctctctctctctctccctctcctgctgccatgcaagttgtgctttgctttccccttgacttccacatgattgtaagtttcctgaagcctccctagccgtgtggaactgtgagtcaattaaacctcttttgtttataaattatgtagtctcaggtagttcttcatagcagtgtgaaaacaaactaatacaaaaaattggtaccaggagtttgggagactgctataaagatacctgaaaagtggaagcaactttggaactgggtaatggacagaggttagaatagtttggaggactcagaggaagacatgaaaatgtgcaaatgtttggaacttcctagagacttgaacggttttggccaaaattctgatagtgatgtggacagtgaagtgcaggctgaggtggtctcagatggaaatgaggaacttattgggaaatggagcaaaggtcactcttgctatgctttagcaaagagactggtagtattttgcctctgctgtggagatctgtagaactttgaccttgagagagatgatttagggtatctggcagaagaacttcctaaacagcaaatgattcaacatgtaacctatttctgaaagcatacaatcatatgcattcacaaggagatgatctgaaattagaacttatgtttaaaagtgaagcagagcataaaagtttggaaaatttgcagcttgaccatgtggtagaaaagaaatacccattttcagatgtgagggcaatctggcatacaggttttgctgatggaaaaggtgggttcccatggtcttgggcagctccacctctggggctttacagggtatagcctccctcctgtctgccttcacaggctggcattgagtgtctgtggtttttccaggcacacagtgtaagctgccagtggatctaccattctggggcctggaggacagtggctcacttctcacagctccactaggcggtgccccagtagggactctctttgggagctccaatcccacatttcccttccacactgtcctagcagatattctccatgaaagcccactcctgcagcaaacttttgcctgggcatcaggtgtttccatacatcttctgaaatctaggcagaggttcccaaacctcaattcttgactgttgtgcacccacaggctcaacaccacgtggaagctgccaacacttgaggcttcctccctctgaagccacagtccaagctctatgttggcccctttcagctatgactggagcagctggtacatggggtaccaattccccaggctgcacacagcacagggaccatagacctggcccacaaaaccactttttccttctggacctccatgcctgtgatggaaggggctgccgtgaagctctctgacatggcctggagatattttcccctacggtcttggggattaacattaggcttcttgctacttatgcaaatttctgtaactggcttaaatttctcctcaaaaaatgggttttactttcctactgcatcgtcaggctgcaaattttctgaacttctatgctctgtttctcttttaaaacggaaagcttttaacaggacccaagtcacctcttgaatgctttgctgcttagaaatttcttccaccagataccctaaatcatctctcttaaattctaagttccacaaatctttaggacaggggcaaaatgccaccagccatcttgctaaaacataacaagagtcacttttgctccagttcccaacaagttcttcatctccatctgagaccacctcagcctggaccttattatccatgttgctatcagtattttgggcaaagtcattcaacaagcctctaggaagtttcaaactttcccacattttcctgtcttcttgtgagccctccaaactgttccaacctctgcctgttaccaattccaaagctgcttccacatttttgggtatcttttcagcaacaacccactcctggtaccaatttactgtgttagttcattttcacattgccgataaagacgttcctgaaacagggaacaaaaagaggtttaactggacttacggttccacatggctggggaagcctcagaatcatggtgggaggcgaaaggcacttcttacatgatggtgacaagagaaaaatgaggaagaagcaaaagcggaaacccctgataaacccccagatctcgtgagacttattcactatcacaagaatagcataggaaaaacccacccctatgattcagttaccttgccctgggtacctcccacagaatgtgggaattctgggagatacaattcaagttgagtatggggggcggtggggacacagccaaaccatatcaagaaacattaagaaaagaaggccgggcgcagtggctcatgcctgtaatcccagcactttgggaggctgaggcgggcagatcacaaggtcaggagttgagactatcctggctaacacggtggaaccccgtttccactaaaaaatacaaaaaaattagccaggcatggtggtgggctcctgtagtcccagctacttaggaggctgaggcacaagaattgcttgaacctgggaggcagagcttgcagtgagccgagatcgtgccgctgcactccagcctgggcgacagagcgagactccatttcaaagaaaaaaaaaaagagaaagaaaaacagtttaggctgggtgcagtggctcatacctgtaatcccagcactttgggaggctgaagtgggcagatcacgaggtcaagagatcaagaccatcctggccaacataatgaaacctcatctctactaaaaatacagaaattagctgggcatggtggcatgtgcctgtagttcctgctactcgggaggctgaggcaggagaatcgtttgaaccagggaagcagaggttgcagtgagcagagattgtgccattgcactccagcctgggcgacagagcgagactctgtctcaaaataatagtaataataataataataataatgaagaaaagaaaaacagttaaaaaatctaagatgtcaaatattttaagaagtgaaacaaggtattttgtgttctttcaatatctttattaagaagtgacaagaagaatttattggaattgttctgtcagtagcagtggctaatatttataaatgcagctatattaggttaattaggctgctgtaacaagatagcatatgctgggtggcttgaccaacagaacattttcaaaaagatacctattataaacactgctaacctttagaaaagaaaaagaagttaaatgaatgaagtcagttgtgaaactaccttactgaaaacatgtgaataataagaaaatgatttattctactcagtctatggaaaatgtctttctctaatcataaaaatagcataaaaagcagaataaataaaagaaaagtcacacattcaaggtaaattagcagcattaaatggcagaaatttatttttttcacagttttagagaagtctgggatcaatgattggcaggattggtttcactctgaggtttctttccttgtcttgcagatggctgccttctcactgtgtcctgacatgttcatcttgtgtgtctgtgttgtctgtgccctaatctccttttcttataatgacaccagtcatattggatcagagttcaccttaaggactccattttaatttaattactattttaaatatagttactttgtattagcccattctcacattgctaataaagacatacccaagactaggcaatttataaaggaaagaggtttaattgactcacatttggaagttccaaaccttctcacatcttcatgatggatagggaggccttgggaaactcacaatcatggtggaaagggaagcaaacatgtccttcttcacatggcagcagtaaggagaagtgctgagcaaaagggggaaaagcctcattagaaccatcagatctcatgggaactcattcactatcatgagaacagcatgagggtaactgcccctataaataaattacttcccaccagattcctcccatgacacatgaggattatgggaactacaattcaggatgagatttgggtggcgacacaaccaaaccatatcattccacccctgaccactcccaaatctcatgccctcacattacaaaacacaatcatgcccttccaacagttccccaaagtcttaactcattccagtattaactcaaaagtccaagtccaaagtctcatctgcaacaaagtgagtcccttctacctatgaacctgtaaaaccaaaagcaagttagttacttcttagatacaatggtggtacaggcagtgggtcaatacacgcatcccaaagaaagacattggccaaaacaaagggatcacagggtccatgcaagtccaaaatccagcggggcagccaaaccttaaagctttgcgatgttctcctttgactccatgtttcgcatcctggtcatgctgatgcaagaggtaggctcccatggcctttttcagctccatccctattgcttttcaggatacagcctgcctcctggctgctttcactggctggtgttgagtgtctgtggcttttccaggtgcaaggtgaaagcctttggtggatctaccattctgggatctgaaggatggtggctctcttctcatagctctactaggtagtgccctggtggggactctgtgttggtactctgaccagatttctgttctgattcgccctagcagaggctcatcaggactcctccactcagaagacttctatctggacatccaggcattttcatacatcttctgaagtctaggtgtaagttcccaaacctcaattcttgtcttctatgtgtctgcaggaccaacaccacatggaagctgccaagggttagggcttgcaccctctgaagcaacggcctgagctctaccttggccccttttagatatggctggagcagctgggacacagggcaccaagtcccaaggctacacatagcaggggggccctggacttgtcctggaaaaccatttttccctcctaggcctccaggcctgtgatgggaggggctgctgtgaagctctctgacatgccctggaaacatcttccccattgtcttggtgactaacatttggctcctcattacttatgcaaatttctgcagctggcttgaatttctccccagatattgggtttttcttttcctttgcatcatcgggctgaaaatttttctaatttttatatctgcttcctgttgaatgctttgccacttagaaatttcttccactagataccctagataatctctctcaacatcgcagttccacagatctctagggcaagggcaaaatgctgccagtctcttttcatagtaagagtaacctttattccggttcctccaaagttcctcatctccatctgagaccacctcaacccagagtttattgtccatatgactatcagcattttggtcaaaggcattcaaaaaggtctctagggagttccaaaccttcccacgtcttccttacttctgagccttccaagtctctaggaagttccaagctttctcacattttcctgtcttcttcagagccctccaaactgttccagcttcttcctgttactcagttctgaagtaatttccacattttttgggtctctttatagcagcaccccattcctgtcaccaaaatctgtattagagttttctagagggacagaactaatgagatatatgtatttatgaaagggaatttactaaggagtattgactcacatgatcacaaggcaaagtctcacaatacaccatctgtaagctgtggagcagggaagccagtctgagtcctaaaacctcaaaggctgggaagctgaaagtgcagccttcagtctgtggccaaaggcctaagagcccttggcaaaccagtggaataagtccaagggtctaaaagctgaagaacttggagtctgatcttccaggccaggaagcatccagcatgggagagagatgaaggctggaagactcagcaagtcagctcttccatcttctctgcctgctttattctagccatgctagcagctgattggatggtgcccacccacactgacccacccacattgagggtgagtctgcctctctcagcccactgactcaaatgttaatctcctttggcaacatcctcacagacacacccaggactaatactttgcatctttcggtgcaatcaagctgacactcaatattaaccatcacacactttctggggccctgggagttagaacttcatcatatgaattttgaagggatacagttctcccacaacagtagccagcatttaataaatgctaactatgagtcttcattatcctaaacatttttcatgtgctgacttgtttaatctgtgaaacaaactgatgagctagatactattagaaattccattttacagatgtgaaaactgaggcacagagatggtaaacaatgttctagaagtcacaaaggtagttagtggcagagtggggtataaatggaggtagcctgccccagatctgccttctcagccactgtggtgttatgttagttggacaaataaagcacgaatatattgagagtgaactcacagctcagaagatgacttcatgctttgactccaccaactatgccttttggaaagccatctgatctctttggggcatccatagcctcctttatttgtgaggaaaaactgacaagatgatgaaaagctcttatgcaaataagaaatacaatataaatgtcaacagttgtggtaatttaatcagtaggagtgttcgtcacttatatttatggcagcctagctactcagctgagataggactgtgttgagaaaatagatctacggcaatatggatgaaagaagatcatattgtgtgtggcagtaaacctttttggctcctctagtaaattccacatagtactaaacagtctctagccttgtacatgtgtatattataattttacaattaagtgaaagggttattattttaaaacgattcaaaggtgaaaaagaaccaggaactgttgtgccaaagctctagcctctccagtgtcatttgaagctggcctggcattcatagctgttgttcacctattagatgtaagaaatctcatcaaacaccagcatcaaagtcactctgagactgtcccaaagcaagacaaaacaaggccacttaatttttttaaaaacacagcaaaaacaaggtcactgtgctatctgcaaaacggcaaacatccccctttcatgactaacatgagtgacttctacttctttaccaattacagctttagcctcattcttgtctgccttacatatagatgatacttactgagatatcagaacacagaattgccccctgctttttgtcagcacttagagtgaactcctgcttatttagattctcctcaaaagcacccaaccaaagcacaaaccctatagtagatttttttttcctaacattctctatattagtttgctagggctgctgtaacagagtaccacagactgggtggtttaaatgatggaaatttattttctcacaattctggaggctagaagtccaagaacattaagtgtcagcaggtttgatttcttctgaagcctctctgtttgtcctgtagatagctgccttcttgctgtgtccacatacggtcttttctctgtataaaaatatcaatctttcaatgtgttaacatttcttattattaaaaagctagtcggattggaatagagcccatcttaatggtttcattttaacttaatacctgtaaaggccttatctgcagatgtaatcacattgtgaggtgctatggtcagggcttcaacatatgaattttgagaaaacatgattcagcctatgaaatgtcttactatgatgtcccacagtttcttatgtgtattcttccttactgtaataagtaataaactcaacttgttcaactgcaggtatgtttctggtggtctttaactgaagggcattgacaaaagtactgcaattgcccaactaaaatctagcttttagttactagcattactagtattactagtatttaaagtactattttcccaagtgataaagacttataaagatctttttggttcataaagcttaggaagaaaggacatccaaaattgaaactatttcattacagactatttgaacatctccactttgcctttggctttacagataacgtaggcttgaggtaatgctccattcacatatatttctagtgtatccttatttttgtttgcataaaagtgggaggttgtgaatatcatgtatcccatcttgtcataaatagtgccacacatgattcagtacaatgttctagttttatatattcttatgttcttcctacccacgtggagggaaaaaaaagaggtttatactggtgtgagctgcccaatttagttactaactgtccacccactgttcttttctttgcaccctatgcttattctgcagttcgaatgatcaaattaaatggtagacctaattaactgtaagaactttgtaagcttctaactaaaaaatctgctgcttctggctcactttcttttttcctcacagaaaaacttctttatacttacggcttattactgtctgataatttatacagtatttgcctacacacacacatacacattcaactaattttattctaacaccttaattcatgtgcccatattctgtggcttgaaatctccctgtggttgcatagcaacctccgcaagttgcgaacagcaaaatgacttgttgtggggtactaggagagagcgtttcaagtaacattgagccagcatttccataagtaacttttttttctcttatactttgatagaagcatgtttaaaggggaaaggttagaatctgagattaatcagagaaaaacaagtattagacaccaaagagaaatgtttagacaagttgataaagcaactggcttgatgggttcaaaggtttttgtcctttgttgaaatgtgagcttcaatctgtgacttaaattttaaatggtgtgagcaaagagatttatttttaacataatgagattaattcactaatatattgaagctaaagccaaactataaatgatgtcaggtgctggaggtaaagctgtttgagatacaaacactatttatttatgtttcataaaataattcagttctgttttccacgacagtcaacaattttttctggcttttgttttagacctctgatgtactaggggtagagaggtcaaaagtctcagtgccttaggaccttattctttctgaataaaatctgtagtcttcctatgggaggtccaaactggaggaatactttttttcctcttatttaagcaggttgctatttgtagaatttgtagtgttgacaactccaaccttaatatccattgtctgcctaatgcacctaattaaaatacatgcacacagagaaaatttcccatttatgatgtagcacactagggaatgtcttccaatactatacttttcatttggttgcattatagtgtgcgttttaaagtcattctctagtatcctattcttcccatatctattaaagtactttttttctgtctgagctgcttatgatcatctaagtagtttcagtgtgccaaaaagtagtggctacaataactattttcatccattctgaatttaggccctgttaattaaagttgtgatcagaaaatcattttagtagtaatggactactcctggtgttcggacactgcactctcaatgagatccacatttcgtattttgtatgcagaaatattcaagagaagtacttttgctgactctggatctgatgtctataataaccctaagatcaataccatataaagtcaatcatctagtggagggaaagcataactaatatttattgagcaccaaccatgtcagtgtctatttatatgctgttctcaatgtggacagcaataaggtgggtattactatatgacttttaagtaatgagataaccaagtctcaaagaaattaagaaaaattaatcatgcctcacatctaagaagtaacagacgtagcactcaaacctattcgtctgatctgtatactctttcctaccaccccactgtgagattcagggacctaacattcattgactactctttgtcaggcactggtgggagatttatatgtattatatgtataatatattctataaggtgctctggatccttcaaagacttctaatccatggcttctgaactcaaagaccttgtaacatatttaagaagattaattttatgaggcaacattaaagtaacagaaaagaagtggagataattgctgcaggagctgagagacttcactaatcctcaggttgtagcttggcattcaggaagcctatgttcattttctacttttctgcttttgtcacaaattgcaggagctctatatatttatgacgttttgaatattgagtgattgtggaacaactgggtatagcctagctctaccacttactacagtggattctaggcaaatcaactacttttttgtgcctaaatttctctgtatgtaaaatgtacacaataatagcacccagtttatgatattgctgtgatgattaaatgagatctaggaatgatgattaatgattaaatatgagtttagaaaactttaaatttttatcattatataaatgtttcaaaaatagatttcatgatcataaaagaagttaaagttaggttggtgttaacatggttagaactataataacaggatttgtgtttgcatgggatatgattgcacatgtactcataaaatcaatgaaatttactttagtgagtattgagcatttactatgtgcaggcatttggttagaaaaagcaaatgaaaaaagaagacaaaaatccttgtccttgtcaaagttatagtccatcagggagtagaggagacacgcaataaacaataaatgtagtgaataggtaaatattatatatatctgacatgcatgtgaaaagaataatcttaaagagttctgagcagaaggaagttattgtactttaaaaagtggtcacaaaagcaattgatagcgtcatgattgtcctaactttaaggtatcttttcataactgcttactttaacgttaattaatggttaagcacttttatactttgtttttgtaattcttacaactttgtaagataggtattttcagccttgctttttaggtgaggaaaagaaacttgcctatggtagagtgcctgtggtggtagagtgtggatatgaattcagcttcatctgactttacagccatgtttttaactactagggaattatgtctattcctgcctgagagctattttttttcccttggcagcaaagattattaggttcaggttacaggtgtatgatttgatacagtattcctttcttcttgtcattaatgctttctaggtattgttgaaactgatggcaaaaaatgttagtaaaggaaagtaagagaagacgtctaattcagtccatgatttcagaagcagagctgtattagaaatgtaaattttaaaaaataacccagaaaataggaactggttgaaagttataattggatgccctctctcaccactcctattcaacatagtgttggaagttctggccagggcaatcaggcaagagaaagaaataaagggtattcaattaggaaaagaggaagtcaagttgtccctgtctggagatgacatgattgtatatttagaaaaccccattgtctcagcccaaaatctccttaagctgataagcaacttcagcaaagtctcaagatacaaaatcgatgtgcaaaagtcacaaaaattcctatacaccaataacagacaaacagagagccaaatcatgagtgaactcccattcacagttgttcaaaaagaataaaatatctaggaatccaacttacaagggatgtgaaggacttcttcaaggagaactacaaaccactgctccatgaaataaaagaggatacaaacaaatggaagaacattccatgctcatggataggaagaatcaatattgtgaaaatggcaatactgcccaaggtaatttatagactcaatgccatccccatcaagctaccaatgactttcttcacagaattggaaaaaaaactactttaaagttcatatggaaccaaaaaagagcccatattgccaagacaatcctaagcaaaaagaacaaagctggaggcatcacgctacctgacttcaaactaaactacaaggctacagtaaccaaaacagcatggtactggtaccaaaacagatacagaccaacggaacagaacagagccctcagaaaaaataccacacatccacaaccatctgttctttgacaaacctgacaaaagcaagaaatagggaaaggattccctatttaataaatggtgctgggaaaactggctagccatacgtagaagctgaaactggatctcttcctttcaccttatataaaaattaattcaagatggattaaagacttaaatattagacctaaaaccataaaaccctagaagaaacctaggcaatacccttcaggacataggcatgggcaaatacgtcatgactaaaacaccaaaaacaatggcaacaaaagccagaatagacaaatgggatctaattaaactgaagagcttctgcacagcagaagaaactaccatcagagtgaacaggcaacctacagaatgggagaaaatttttgcagtctactcatctgacaaagggctaatatccaaaatctacaaagaacttaaacaaattgacaagaaaaaatcaagcaacctcatcaaagagtgggcaaaggatatgaacagacacttctcaaaagaagacatttatgcagccaacagtcacatgaaaaaatgctcatcatcactggtcatcagagaaatgcaaatcaaaaccacaacgagataccatctcacaccagttagaatggcaatcattaaaaagtcaggaaacaacaggtgctggagaggatatggagaaatagggaagcttttacacttttggtgggcgtgtaaattagttcaaccattgtggaagacagtgtgatgattccccgaggatctagaactagaaataccatttgacccacacatcccattacttggtatatacccaaaggcttataaatcatgctgctataaagacacatgcacatgtatgtttattgcagcactattcacaatagcaaagacttggaaccaacccaaatgtccatctatgatagactggattaagaaaatgtggcacatatataccatggaatactatgcagccataaagagggatgagttcatgtcctttgtagtgacatggatgcagctggaaaccatcattctgagcaaacttcacaaggacagaaaaccaaacaccgcatgttctcactcataggtgggtactgaacaatgagaacacttggacacagggcagggaacatcacacactggggcctgttgtggggtggggggctgggggagggatagcattaggagaaatacctaataaaaatgatgagttaatgggtgcagcaaaccaacaaggcacatgtatgtatatgtaagaaacttgcacgttgtgcacatgtaccctggaacttaaagtataataataataaaaaaaaggattcagaactagagaaatggccaaactaacaggaaattagaatgaggggaacatatctaaattgatccgacaaagtctgacagatgttgcagacgtttcagtttacaactggctgtttcaaaaacagccagttttaacctgttctacatatggtattatgcatgaaagtttcttcaggcatgctttattttaaatccatcaattaatgcagtcttctcgttcaattgttgtgtggaaaaaaatgaaaaatgtgcagacggaataagctaaggctggcaaaaggagaattaaaagaatatttctacatgtttttggtaatcacttttttttctttttttttgggacagagtctcgctcagtcgtccaggctggagtgcagtggtgccatcttgactcactgcaacctccacttgctgggttcaagcaattctcctgcctcagcctcctgagtaccaacaactgtcttaaaaagaaaacattacagataactttggaacccctgtgtattcttctacaaacctatttctttctcatcctttctctccttcactacttctccttcccctgaggtaatcaccccttcattacttctccctcccctgaagttttcctctagatgtccatcatcaacaggaatcttttttatattttacgatatatgttggtttccacaaaccataaattaaatttccaattttacctatgtacaggaattgatgtcctgaaaaagtatcctgacaaacgtctggaaagactggttaaaatataagaaacgtttctcaaacatgaagttaaactcatgagaaaggaaatcacaaaaaatgaggagggaattgagagccaaaatgataagggaccctgaggttgtagctctcctactattgctttttatgtatttaaagttatattattagggtaactatagtcaataataatttaattgtacattttaaaataaaagcatctgggtgcagtggctcacacctatgttcccagcactttgggaggctgaagcaggaggatcactcaagcccaggagttctcaagaccagcctgagcaacatagtgtgaccctgtctctacaaaaaaattaaaaaattagtagggtgtggtgacacatgcctgtagtcccagacacttgggatgttgaggtgggaggattgcttgagctcaggaagtcaaggctgcagtgagccatgatcatgccactacactccagcctgggtgacacagcaagaccttgtcttaagaaataaaaataaataaaagactataatttgattgtttgtaacacaaagcataaatacttgaggggatgggcaccccattttccattatgtgattattacacactgcatgcctgtatcaaagcatctcatttaccccataaatatatacgtctattatgtactcacaaaaattgaaaataattgtttcaaagttttgttattaggtacatacacacttatggtgaatctttccttttatcattcagtcattctttttgcctaataataatttcatatatttttccttttgttcataaattttatattgttttatgccaactttttttggaagaatagcttctattagtatttgacagtatttgctgtcttttaaaaaaatatccttttacctgcaattgtttggggtctatatgtttttggtatttagaaattatgttcattgtaattattgttaattttatttccaccacttttatgctatttttattatgtttgttttttccttgtgatgtagtccatcagattgatggaatttactttgtcttttattctctctaatcatttgtaaatgatgtattctgtttatattcatttaaatgttaccctttaaatttaacatatatagttaacaaaagtttaaagagatcggaatttctgctttcttacccaatatataattgacttagtacattttccttttaataacctccatcaagttttccatattattgtgatgaagtgttctgtaattccacctttatttatctacccaaattaatcgttattcttatttgcagtcatttcttgttttcttggtaattttttcagaatcatctaataagttagtaatcatctgttcagtttcatttcattttctatttttgctgtctattaaatttttattttctagaaaatatatttgggttttcccaaatctgcctgggtatttttttgtatttatttttatattcagagtttctcctccatccattaactacttagtcatttaaataaacttactattttgtataagattgttctattttctgaagtcttaggggtgtacctcctgtttgtagcatctgctgattttgcttttggcttccttatgtgctttctaattttaaattgctcatctactgtaggcaatcctctgttttctggatttagggtgcatcctataagaatgattttttgcatttccttctatcaagaatcttaaagatttaccagcctgcaggcaacattttatatacattttaagctttggaccaagcaggtggtgggaattcaaacacaaaacctgattaaagttaggcctatggtcacatttattggctgaatttcttttctcctccatcacagatccagactggaaagaatagataagctatcttttcttttctctcagtgagaaaagggaacatttttatagctcaccatttcatatgaaggtaccctgtttaagggcaccaggtttatgtttgggattgggtaatggtgtaagacttgaggcagttaattcatatagcttttagtaagatcaacagtgcactccaccaaaacatacgaccaacttggcatttacagttctggattttaatttactcttcgcttttgtctgtgaaattgtgttactttcttttgacctactatgtatttttaaaatgtttcttgtatttatccaatgtgcttagggtttttgtagtttgagagcttttagattttctaggtctccctatgcaagaaattaatctatattcatgggcaatacaaagtggatttaaaaagcagcagactgttattgtggtaataaggaaagtcctgtagtctcatagattttctatattttgtccatgctattctttctaaatcacaagtccaattatatcatagcataaaaccccttcagtgatttcccatgctcttgggataaattctaatttttaaaggatatctttcattgacttttattctcttgtccccactttatatccagttctcgccatgtgatttgtatgaagctagaatgacttccttaagttcttcaggtttatcattttgttttccaccccaaggctttttaatgtgctgatccttttgctttaaacagattagttcctacctctcaccttcaccacaactccgttgatgattgtctgtttttcaggtctcaatttaagtgtcacttcttctagagagtttttcttgtcaccatcccccatgtactcacccacccatcttcattatatactcctagagcacatgtacttcctttccttctctcatgtcactaaaatcacacctatttatactgctaatttaatgaatatttttgctatgctataaattccatgaaaatgtacaccaaaattattccttcaccattgattttctacatcttagcatgatggcacattactcatcaattaggaaatactgaatatttcaaattataattgctaatgataattattattattaatagctatcacttatgggctagtactgtacagaaattataggcattacagtattatagggaaagcttaattaggggttatttataagagccttttacaaatggaaaatgacctgtatcctgtaatgttaattagccagtctgggaggttatatattcagacctattatagcacatggagaacatttttactatggtggctactttgtttttatttttatggatacataatagttgtacatatttatggcaaatatgtaatattctgacaaaagcatacaatatgtagtgatcaaattgggatatccatcacctaaaacatttatcatttctttgtgttgggaacattccaaatccactcctatggttatgttaaaatatacaatagattattgttaactatagtcaccctattgtactatcaaactaaatcttatcccttctattgaactgtattttgtgctcattaaccagtcactcttcatccttccccctactactctccctaccctatggtaaccactgttagattcaccacctccaggagatcaatttttttagctcccacatatgagtgagaacatgcaatatttgtctttctgtgcttggcttatttcacttaacataatgtcctccagttccatacatgttgctgcaaataacaggatttcattcttttttatggctgaataatattccactgcgcatatttcaccgcattttaaaaatccattcattcactaatgaacacttaggttgattccatatcttggctattgtcaatagtgctgcaataaacatgggagttcagacatctattaaatatgctgatcttccttattttggataaagacgtgggattgctgaatcatatggtatttctatttttattttgggggggaactttcatactgtttccatattggctgcactgatatacattcccaccaaagtgtactagcattcccttctccaaatccttgccagaatttgttattctctttttgataatagccatttaactggggtaagatgatatcccattgtggtttttattttcatttctctgattagtcgtgttgagcatttttttcataaacctgttggccatttgtttgtcttcttttgagaaatgtctattcaaatcttttgcccattttaaaatcagattttttttttgctattgagttatgtttcttatatattctgattattaatcacttgtcagttgaatagtttgcaaatattttcacccattccataggttgtctctttactgtgtttcttttgctatacagaagctttttagctcgatgtaaacccatttgcccatttgtcaatttttgctttggttgcctgtgcttttgggatcttaactcaaaaaatctttccccagactgatgtcctaaagttttttcctaatgttttcttctagtagtttcagaatttcaggttttacatttaagtctttaatccattttgatttgatttatatatatatataaaatgagatatagggatctagttttattcttttgcatatgaatattcagttttctgagagcatttattggaaaaggtgtcctttccccagtgtatgttcttggcgcctttgtcaaatataagttggctgtaaatgcaagatttatttttgggttctctgttctgttctattggtctatgtgtttgcttcatgctgttttgattgctatagtatagtagttatatatactatataagtacttacctacttggaatttttcagggtagttcctttttccaggcatggacactacacctaaagcatattgagttcccagatggcaaatacaggtgaaaagaaatctaaacagcattttgaaatctagacaggctgtggcacagaaagagtgtattcctgggccttcctggaagggacgtacagacagaagtgcagtcacgaatgccaacaatgaaatctgtttatgggtacaaataggaggtcatgtaaatatcagcaaatcatctgggcaaatagaccagtttatactgctgctaggtgaggaagatgaggttcaaggtgggctgtatgataataaattcctcattcaaaaatagggcagaggccatttttagtgatttacagtgctagcacggtcaaatattgcttttaaattagatatctgtgttgtagttcagcctttcaggcttattgatgatcttcaagttgaaatatacaaagaacagcgattaccatccttgtcaccactttaatttcacaattatctggagttgttttcaactatgatggttgtttgcatttgttattttgtgacatatccccatccttctagtaaagaagtttaaatgtggttcttgaagtttaatcacccccatgaagtgagtagtttcactgagccccttcaagtattacatgcacaggaataacagccaaaattgattcatttctgggtctttaagacagccatgatcatttccatctcaaacacaaatatctgatgaagttttcaaaatgaatttatagattctgaagaatatattatggcaacaggaatcaataaaatgatggattcttttttaaaaggtgtgtgaaaaatactggatagtgaaaggattggcaaatagacccatgaggaaccagagatttttggaatcattggctaagttcattggtagtgtattactgtaacactacactattttttttttcaggaatgtttggactcccttaaaggagcagatataacactcaacactagggcattaaaactcatcttgctcaagtattacatacaaatgatactaacacaactagcccaggacagataggctgaaattgtctttttttttttttttttttttgagacagagtctcattctgttacccaggctggagtgcagtggcatgatctcagctcactgcgacctccacctcccaggttcaagtgattttcatgcctcaacctcccgagcatctgggaggtgcccactattacacgcgcctaatttttgtattttagtagacatggagtttcaccatgttggccagtctggtctcaaactcctgacctcaagtgatctactcacctcggcctcccaaagtgctgagattacagacatgagccactgcgcctggcctgaaatggtctcttgaattaggagtatgtggatattttacattgtcattcagggaccagaaaacttcttggcttggaagtctgtcagagtgtctgtgtgtgtgtgtgtgtgtgtgtgtgtgtgtggttgaatggagacaacaacccttggagaattgtgggtacctttttttagaccaaagttcgccgataggcattcaaatattccaatgtgtttctataaggtgtataattttgtttgcatataatgagccccaactcatacaagcttatataaaaaaaaattggaagaattcacaaacgtccaacctactgttgtgatgttatttgaatacaggcccacctcataaccctttccatgcaatttcctcattttgcaatgctctgaaacaagatcttacttctctgtgtcacttatttcctgttcaaacgttaccttcttagagaaacattccctggatagcttatttataacattccccttaacatgctttaattttcttcaaatatttttcactatctggcattatgttatttatttatttatatgcttactgattgtctcctcataagaaatgtctctgatgacaggacaatctttttatcatttttatatctaccattcctaatacctagtagactttcaataaatatttgttaaatgaataaatcaatgatatttacagatttactaattctaaaaattcatttaaattgttctctgatttgggatttttatatgcattatttttctttatatatcttgttatataaaatataatacttttgtttctttttaaaataattcctcgaaaagaattttatcattaaaaaggcactaacatggcctcattctgaacatattttcaagcactgttacattggagcttcagatgattttctagattgctgaattagaatataatattgtcaaatgcaatattggactattagattggtgcaaaagtaattgtggttttcgccattagtgtaatggcaaaagttaaataatggtaaaaaccgcaattacttttgcaccaacctgatactattgttaattatacatttacattcctgcccatagcaagaccacattttgctaaacagaagtgagagtataactcagtagtgaatatccttcaaaaaatgacattggagtctgcggtaaagtaagacttttttttcacccatggaatatgaaagatgagagtgctttttctttttcttcctcaattttatcatcctccttctccttgctgctcttattcctctttctccttctcctctttctttttctgttctccttcccatttcttcctttcttctcttctttctctaatccttttgtgaaaaaatcccactgggtggaagtatggagctagttttaccagaaaacagcaatagaaaataacagttaaaaatagtgttgctgtttcagcacaccagcatggcacatgtatacatatgtaactaacctgcacattgtgcacatgtaccctaaaacttaaagtataataataataaaataaaaaagagagaaaaacatagtattgctgtctcaagatatcaatgctactattcttagaaagttttttttttgtatttttagaacttctacaaattgaaaagagatgaaaaacagcatcaggcagtatatatatgtgacaggtgggcaagacttgtctagagagtactgttaatactttattttattttaaatgtgtagtttacaataaaaggtgaaaaaagtgctgtagaattaactgttttgatggcgtatttctttagcttatttattaatttcctagtcacataaattatacaatttcagcttttcctttatctggatttgtgaaaagtgatcatggattagggaaataagatatctcagataagttagaaactggatagtgctaaaataaaaaaatatgatatatggctttaagtttgtgccttaagcagacaatcatatttatctcagaaaaaaatcataaatgtgttacagagaagaggattatactgtcatttctattttcatatagtaaaatgcatcttaaaaaataatacaaatggcatagcaataaaatataaacttattatttgtgtaaatgtctattaactgggactcttgaatataattaagtgataatcaggcagatgtcagaatgcacatacagttttaaattatttttctaagaaagcaaatgcagatttcattcaataaattccagaggcaggtaccaccaagagaagcttgccagttgatattagttactgtgatggtgtgaatgtagacaaaccgtcttaatggtttcagaggtgggaataaacaccttaaatttgctatagatgtgaaaaacaagtcaccatttgctccgatttatttggtgtgatggaagagtaatttgctttaatcctttgcaacagcatctctaggctccaaaaaggggagataggggatcacagataagaagcatgcagaagagagctccaaactgcagccagaatgatctttgaaaatacaaaatgacgagttaatgggtgcagcacaccaacatggcacatgtatacatatgtaacaaacctgcacattgtgcacatgtaccttaaaacttaaagtataataataatagaatttaaaaaaaagaaaatacaaatttaataatgtcaccactttgaataaaactctttatcgccttttattgcttttaagttaaaaaccaaaatctttatcatgatttatataaagctttttggtctcaacacctctaccccttcttttccaggctctaatgctgcacttctttcattggcccaaatgatctatgtctccattagctcctcctgcttgctggaaaacagggaagatccctgttcactggcccacttaagaccattctttcctcagattttaagtcttacttcctcagggaactcttctctgtctggcctttcagaccatttcaggttccccgttacaagccctcaaggcatactgtgcattgcctttaatatatgattatttgattaatgtatttttatccaacttgactgcaagcttcacaagggcaggacggggtcagatgttggtcaccattgaattcacgctctaatattttgcctaagacaccattccctttctcatcccttcattacatcctattttcagatactgatttttgaggttctctttgtactgtcaacctctagccacatcagttcttccccttctgtatacaatcagagactgggtgtgtgcatcagaatctaagaggcactgtacctctaagaaaaaaagaagtggtatttgaaaggaattttggtagcaatgcatgcaaaaggctgtagtttttcatatactttcttagttcaacccatgagaaggcagggaaaagatgtaggagaagatcccatttcaaactgagaaaatcagagcatttgaaagcttgcaaaccacatttaggacagtgtgtgatattgactttcatgctgaatttatagtagttgctgatttttaagtaaatgcaaagagaatacatgttaagattggtataaaacagagaaactctttctccataattaatattcaatactttttcttggttcagtaataaggccaccatctgaaatcaaaatgagacccatgacagagtaatggtcccttaagtgtggggggaaaagtcttctggtttaattactagggccttcaattattattccttcagatgaaaatactttcctcatcaatttcttcaaagtctctaataaaagtaaatcgattataaatgctttttacctccaaatgtgagaactttatgcaatgagaagttatttcttttttcttttaacagcttgcaaactgcaggtaatcataactccttattggcaggtaagaaaataatacttgtattgtgaatacatgatatcaaggtacataggtgatttgttccatttggattgtctagcgtgtgtgtctgtgtgtgtgtgtgtatgggtgtgataggtaggtacatatgggcatttttctagtgagataatgcatagcttaccaaatgcctataaccttctcccttgcaaccacttcccctaccataccaataaccagacatagctttatctgaatagtcagggacagaaaactaagggaatccaataaacaaggggggaagacaaaaagaataattagaaagacagaaaagttgaaaatgctgtgcagtatggttacacattccctcccaaagtcattttcattactgcctatgaaatctgagatttagtctatattttctaacattgctatatttggatattgatacagtatgttttagtagaatgaaccaagaagcagttatataaactgagaaaataaggaggaagtacagctgtggactgacatcagggtgggaatagaaaaatgttctggacttagaaaaagctacagatggaataccaatgatggcttggacatgagatatagctcactgactaccaatttatgatgaaaaccacagctgtactgaaaagttactacagtgatgcaatatattatatatggatagcattttaaattttagaaaaaagtgagagtataatttcacataattgtctagagctatatttacatttcctaaaaatttattctaagcccatgaacaaaatgtgtgtgaatttaacagaaaattatatttgttgacattaaattttttccccttaaaaccagcaaagatcttgattctacttagggagaggtgaataaatagtttctgttttgcatatagacttaaatatatgtgtgaaaaataaggttgaaaggttcactttagttactgtaaaataaggattatttatagtaaagtttattaagtcttcaaacacattttgttgacacttgtcaatatttcttgatgtgaagattttatgaattgttctcaaaaataaggtccaatgcacttgtttaggattaggaagcagcggtggtaaaataaattacagctctaaggagatctcaaacatgaaattatggaaaatccagcattaggaggtaatagcttgagctaactccaaccccaaacatgaaattacagattaatagcggcaaattatattgataagacattaactggaaattcatttatcagtccaagtaagattgagatactagacaggtaaaagcaaagtaatcaaagtaattaaacatagtatggcagaaacgtcacgtgagcttgttgagaactcacaataaaattaccatatattacattatgctgtattagtccattttcatactgctgtgaagaaatatcagagactgggtaatttataaagaaaaagaggtttaattaactcacagttctacatggctgggaaggcctcataatcatggcggaaggcaaaggaggaggaaaggcacatcttatatggcaacaggcaagagaatgtgtgcaggcgaactgccctttataaaaccatcagatctcatgagatttattcactctcatgagaacagcacagggaatatacgcccccatgattcaattacctaccaatgtgtccctcccaccacatgtggggattatgggagctacaattcaagatgggatttgggtggggacacagccaaaccatatcatatgccttatgaggcttgagtacaagcaaaggaactaccaatattatattattgtatggtagcccagagcatgggctccagattctggatacttttatctggggcaggaaacttgtctactctgtgccaaggtttcagatttacagggttgccatgagtattaaatgatttgatatatttaaagaccatagcaaaaagcctagcacatagtagattccttcaaaatattatctgtactgttaccactgccaccactattagtatttataatccatggggaagatcaacgtctatgatgttgattcttgaccaaaaacaaggaggaattactgaaatagtaatttatgagcagctaggaaaggaataattggccaccaggagccaagatgaattcatttcaaatgaatcatgtcagtctaaattcatttggacagaaatactagactgataaaagacctcactcactaaacattaggcattttgtttctgaactttagtaagtcagtagaaaagctctttaatcttatacttgtgagaaagacagaaaaaagatatttgaatagttgtttagaaaaataattgcttagtaactttactcaaagagttctgattaatgaattaatgtaaacatgtaagagaatttctaactgttcatttaaggttctagcttctgttgtgccctgtggaatacattttatcaattacccaattaagaataataatagaaattttagaagatattatttatttctaaccaaagcgaatcctccccttctcctactaacaaaacacaaattttgttcagctattaactgtcttttgtgtagcatgtgttcaagggggaaaaacatcaactctagctccagagtcatgattgatttaagacaatccttgtgcccctataacgttttaccactggtaagtttagaaagagagaggagaacattctgacctttaaggaaagttaacgaggatgggaaagtttctgaaagacagaggaaaagaaaagtttattaaggtcttcaaacatttccataaagaagaaaatggttgaagaggcaaatatcatctatagaccatgaagggaaaaagtcaacctggtaagcatagcaggaaagggtagaaatacttcactcattcataatgtctttgaaccagtgaatataataagctggagctttcctaccttcagaagtgtgtgtaatgtaaaacttcctactactatggcagttgaggcagggttctttttttttttaacttgaaactcaaagtatttgaactaatgtatcctgagctgtgctacatgtcttaagctcagtctcctctttaaatacctcaataacgctatgaggtgagtagtatatttatctacacttcattgagaagtaaactgaggctcagagaggtgaagtggtttgcccaaatcatagtgctagtaaactgcagggttgagatatatgcatttagcatttgcatacttagttattataatatacaaactttccagttaatatgtagaaaaaaatggttataaaggttttagagggatagcaaatgtgttgaatggctaatgaagatcccgggaaatttgaaagctaggctgaggccaagagctgaagttactcttgctccatgggaattttgttaattggaccaacttgagtttcagatctgatggcctgatcacaaattgtgtgtggaaataaaagactgggaaacaataaaaagggtgtggggcagtgctaatgcagaaactctgaggccccaacgtaaatctgagacctcaaaggactacaatctcagaatttctaagtatgaactaaaagctaaacgtgttcctacccatcccctcatccctaggatattacaagaaaagtttctctggcacttagcgagcaggagaaaagaaaaaaattcgttaagaaattaccaccatatgtgagattttgaattgaactgtggtaaaaattcttatcacttgggtagtaaaaacaacaacaacaacaacaacccacaagccataaataatttaccatgcaaacactaacaacaagagcaacaacaaaacaggtgcagctatattactgttaggcaaaattggcttcagtgtataaaagatttctgagagatgcagacagtcacttcacatagataaatggttcaatgtctaaggaagatagaaaatttatgtaaatatggatacctactagcatagcctcaaatatatgaagggagaacattcagaattatagaaataaataaatacatcttcagttgtggtggcagattttagcatacttatttcattagttgatacaacaaggagatcaaaacgtaagtaaagtatgaacaatacaattagcattcttgacctaatgaactcagatactcaaggacatacatattttatgtatatatgtgtgtgtgtatgtgtgtgtgtatatatatatggcatatatggaaaactttaaaaatattgacaatgtttctcaaagaaagcttcaaaaatctaataacacttgaaattatataaaacatgttctcttaccaaaatgcatttaagttttgagaggttagaaagcagtaacagttcttatgttatgttcttatggagaaattctataagatgggaactcattaaacacagttatatataatccatggtttaaagaaggaatcatattggaaattagaagatatttttaacttcataatagtgaaaaaactaaatagatatttcagggtcatatagctaagcaatgattagatatttgtgtccttaaagatttatcttaaaggataattaatgccaaccatttgtctcaaaaatttagaaaagtatagcaaaataaaaccccaaaatgtatgaggaagaatataataaatgtaagagaaaaattaatgatctagaaaacagatatacaagagaaagtatcaaccaagccaaaactctgcattttggagggaaaagagaaataaaattgacaaacctctggcaggcttaattatgaaaaaaaggaggcataaaaaattcatataaagaatgtaaaaaggaacataactacaggtgctgcatatcgtaactagatagatggcattataattatgtcaataaattttaaaatatgaaaaaaagttcaaattccttggaaatgataacttactcaaactgaatcaaggcaaaacagaaaatgggaattctatattcctataaacataaaataaattgagtgatcaaaattttttcacaaaaaaacttcagatctggatggctttacttgtgacttttaccagataatccaacaagaaataattcttattttatgcaaactcttccagaggatagaaaaggaaatataaggaaatatgtatcctagttcatttgataaggcttatgtggtattgttaccaacataccaattttcagtagatactaaaagctttctcttgggctttggaacctggatgctgataatactaatcctattcaacattaaatacataatttatgtaaaattaacgacagttcagtaaaggttctggatacaaaattaataccaaacagtagattaatatacaatgctatatgagccacaaacagaaaatgaagctttagagcataacattcacagtagcaacaaaaaatgtcaatgcctaggaacaagtttaacaaaagtgtataagatctctatggacaaaatgatggcgtttttgaaggtcattaaaatatataaataaacagtaatgtattataatcatggattgggaaacttagttttaaaaagatgacatttctttccaaattgatctgtagttatggcacagttcccacggagatcactatagatttggtattgttgaatttacgaggttgattacaaaatttttatggaaatgcaaaaactaagacattcttgaaagaaaaacataattgttggtgaaagcattctaaaagatattaagactccttataaagctataaaatagttgctgtactggggcaggtttagagaaatagaccagtggaacagatctcagagtccagaaacagaaccaggcatatataacagaggtggcactgcaattaggtaagaaaaagatgggcttttaaattaatggtaatggcataattgaatattcaccaagaaattaatggatattgtaaactccttctcataccatgtacaaaagtgaagtgtaggtggattaaagttaagattttagaatatccaatcagataatgtctttatgatcttgggctgaagaaagatttcttcattaaaacaagaaaacccttaaagaaaaagtgttcaaatacattaaaattaataattttttttcatcaaaagaataaaaaaatagcagaagttgcagcacatataaccaataggttatccatatccttaatatgtagagatttctacaactcattgaagaaaatcaataggtttatacagatactttagaaaacaaaaaaaatccaaagggtgattgaacaaataaaaagctaatgcctctcatttattattaaagaaatacaaactaaattcatagctagatatccttacttagtcactagagggacatgtgaaatttaaaaataaatacaatttggtatgaatcagaagtacacatgttttaataaatattttgggaaagagtatgacattctctagtaaagctgaatatatgaaaaacatttattcctttcccaatatactctctagagaatctcctgcatgtgtgtaccaggagatagttataagaattagattttaaaattagacagttataagaattgagatagttaaaaacatcagattttaaaaataaccacaaatagaaagcaacataaatattcatccacaagaaaatggataaaaatttgtggtatactcatacaacggaatgtcacacatcactgataaaatatcatgataaacaaaagagccaagttgctaaataataaattattctaattatagaaagttaaaaaacaagaaaaacattgctaaaagcaataaataattgttataaatttacaatattgggtatctcaaggcaggagggaaatggatgttacagaggaagacataattccaggttttccaaaatgttgtcgatgtcctacttctctaccttgttaaatcaggtatttgttttataaatatagtttaaattatacaggtgtattttatgtaatttttaatgcatatctttaaaatctatattgagaaaaagactacaagtggtatttaaaatttctattaataaatatctgttatcttattgatgtatttcttacttgtgtctgaaggtgtgtgtttcaatgtttcaatatataagatgttaaaatacatttaactccgttaaagataattttacattttttaaatgatgcttagtttcattatttataaaatattaaggtgaaattttatatacatgcacacaaatacacaatagagtattatgcattacattaaaaacgatgttgcttacagagctttgtatacaaatatagaaagcagcaaggaaacttagaaatgttacatatctataatatcaacgtgatccaataagaactagtatttgaagtaaaaaaaataatgtgaaggacgcaatattcttagtcttacctagacttttcagtctatacttaaaatagtcacttacagagtaaagtaatgaatatattgaaaagatttgacattagaatatttaataaagaaatatggataaggtgcagtgtggatttcatgtagacataagagttgttttcaaatatttgaaggcccattatatggaattttgattattattgtcaaaatggccccaataataccaacagcaccaataaaaatatacataaattggacttcatcaaaattaaaaactcttgtgctgcaaatgataccatcaagaaagtaaaaacacaaccacagaatgagagataaaatattttcaaaccacatatgtgataaaagacttgtatccagagtatgtatatatgaaactcttacaattcaataattgaaaagtaacccataagctagttctatttttaattttttgagtcaccttcatactgttttccataatggctgtcctatttacatccccaccaacaatgtataagggttttctttcctcggtagtctcaggaacacttttatctattgactttttgatatatccatcccaacaggtgtgaagcgatagctcgttttggctttttttttttttttttttgcatttccctattgattagtgatgttgaaccccttttcatatacctgttggtcatttttgtgccttctttggaaaaatttctatttgggactttcgccaatttttaaactggattgttcatttttaaaaatattgaattgtgagatttccttatatattttatatattaatctcttgtcagatttatgctttgaaaatattttctctcaatctgtagactaccttttcattttattgttccccttgctgtaaataaactttttagttttatgtagaccctcttgtttacttttgcttttgttgcctgagctttggtgtgatatccaaaatatcattgccaaggctaatgtcaaggagctttccctctatgttttctttgtggagttttatggttttaggtttcttgtttaggtcatttatccatattgaatttttgtgtatggcataagataacatacgcaattgtccagtttcagtgttttgcacgtgtgtatctaattttcacaacacttattgaagacattatcctcccccactgtgttttcttagtgggcttgttagcaaataatccctctgttaagaacatatccaaggaagtgaaatcagaacctcatatagatatatctgtgtttccattttcattgcagcagcattattcacagtagcaaagatgtggaaacaacctaagtgcccactgacagacgaatggataaaaaatacacacacacacacacacacacaagcacagtggaatattattcagtttttaaaaaatagatatagtaatcccttgatatctgcaggggatttgttccagcatgccttggagatatcaaaatctgtggttgcttaagtcccttaaataaagtggcatagtatttgcatataatctgtgcacatcttcccatatactttaaatcatctctaggttgcttatagtacctaatacaatgtaaatgctacataaatagttgttatgctatattgttttttatttgtgttattttattaatttttatttatctatttaatatctattatctgtagtttattgaatctgcatatgcagaacccacagaaatggagaactgactctacttccatttttgacaacatggatgaagctagaggacattatgctaagtgaaataagcaatatacagaaagaaaaatattctatgacctttcttatatgcagaatcctacaatataaagttgaataaatagaaacagagagtagaactgtagttattatgagaggaagaaatggagatgtggatcaaaggctacaaatttgcagttaggaagaatgaatatgtctaggggcctaatgtacagtatgaagactgtagttaataatattctactgtatactgaaaaatctgctaagagagtatattttaggtgtttttacctcacagatgcacacacacacacacacacacacacacacacacacacacacacaccaggtaaatatagaaggtgatggatatgtacatttgtttgactgcagtaatcatttatgtgtatgtatctcaaaacatcatattgcatatctttaatatagacaacacaaatcaattttcaaaacaattaaataaaccaattaaaaaaagagcaaaagacccaagtatacatttcttcaaagatgacatacaaatggccaaaagcacatgaaaagaggatgaagactgtcaggcattagggaaatgcaaatcaaaaccaatgagatactaattcactcctaccagaatggctttaaaaaaaagatagataataagtgttgatgaacatgtggggaatttggaaccctcacacctattgctggtggcaatataaaatggcacagacgctttatgttttatggaaaacagtttggcagttcctcaaaatgttacaggtagacctaggtatggaatttcaagagaattgaaaacatacattcacaaaaaaaaactttgtatacaaatgtttgctacagaattttcaacgtagtgaaaagttgaaacaacttgatcaactgggacatagataaataaaatttggtatattcatccaatgaaatactattctgcaataaaaagaaatgaagtactgatgcattttataatgcagatgaatcttgaaaacatattctaagagaaagaagccagtcaaaaaagactacagattttgtaatttcatatatataaaatgttcagaataggaacatctatagagacagaaagtagctcagtggtttcctgagctggagagattggggcaaaaatgggagtgattgctaataggagggatgtttctttttggggtcatgaagatgttctaaaatggattgtggtgatagttgctcagttctgtgaatatacttaaaaagttagaattgtacactttaatggatgaactgtatggtatgtgaatattgatgaactgttaaaaaaatgacccctaagggataaattaggttcaacaaatagattgtacaggaagacttatttgcctcaatatatgggaaaaagctaggtatatgagtttttgatggaacaatctgacattgtacatggcgattttctccctaccacagatgtttaaacctaggtagggtacaataaatgttttaaatattttatgtgtggttggcagagatgatggtctgtttccttcttttccttttttttttctttttttttttgagacggagtctcgctctgtcgcacaggctggagtgcagtggcgcgatctcagctcactgcaagctccgcctcccaagttcttttgtatttttagtagagacagggtttcaccgtgttatccaggatggtcttgatcttctgacctcgtgatccacccccctcggcctcgcaaagttctgggattgcaggcttgagccaccgcgcccggccgacggtctaagtttccttcaaccttatagtttatagttatattaggagggacctagttttattttataattaatattgtatgaacaactcaattatttgtgtgataaagtaggacttaaatacataaaatagttaaatatatatggaatgattgtatagtatttggtaaattgcatcatgaattaaattgtcttttctaaaacatgaagatgacccattagtttcaagggatggtgacttatttccaggaagaaaaagaaatatgtcaattgcctaatgtcaaattaaaaagatgtaattcccaccctttctcttgacccatctctgtttccttggaaaagaagtaaatttcaaatttaagtgggaaaaatgtttagctttggaagaaaagaatgcctgattatatgcttccatgacccttctgatttaagaattattacggaaaaaacagtctcaaccaaagcctctgtgttctaggtttgtgaccttctgcaaatcactaactctttaaatcttaatttctttatcagcataatggggataataatagggcaaacttcactgggtgtttagaagaattaaattaaatgagataatccatgtacaccacataaaacagtagctagcttatggtaagggctctataaatgtttatttaaaagcccaaacaaaaacagatggcttctgtcatcagaatggataacatttaagcaaagtttcaggaaagaaaactggatttaatcaggagagctattatgggatttatttatattttatctcagcacactgctttactccttccagttgcacaacctgtcctctgactagaggtgtagagaaaggattgtcaaatgggaactttcagacatatataaacatgtcaccttacatatgccccttgggaccagagatgcatctgcttagtggactggcagaagacaatagggaatcatatgtaatatatacttatcataatgtattactggttttctgtgcacatatttggaacctcacaggtcactttagagattataattttgatataaatgatagactctgtcatttcattcttaatgcttaaaatacatccaagataaatctaacataaagtagtgaaaactttagtttcactgctgacactaaaaatataaaagtatgaataagtcatatcttggatgcatgtatatattaaattttatttttaaattcctccaacagccttttttcagactgatggagcaatcatacgctgagttttgaatttatagcttgggtgaaggtgaaggtgcagtgttttatattaagaggctagatcaataatgctttcactgatttttaacttgaaacaaaacgaagagtttttgagactaagataatgcttatcccagtaaagagttgtgatacctaaatgacatatttccattttctaaaaattttgatgtatttctaaaaatgagaacaggacacaataattctagaatagcaatatatctgtttccttctggttgtcttattttggctttcatttcccacttttttggatgtcatagatctagctgataatagacattgaaatatattgcacaatttcagtacagagaaggccaccaaaatttataagtgtcttgagggatgtctttcttgttataccttagtgtaaaagcaagcatgcatttcctcccacaatgaaaactgaattgtgtgaaagaaggaaacttccatctatagaatttctgtctttttctttatctccacattcaatactcaaattcaggttcttaggattgctcaccagctttctaactggttatctgtcttctcatctttttttctctctcccatcctttatgttaaaatcattacccctaaatcttccccactaacatatatgcacccattttcagagtgtgcctggtaaaatggcactaatcccataagaaaaagcagagggagaattttctcatttttgttaatttctgttgctaccaaaaccagaattaatttatttcttacatgaatcttttactaccaaaatactttccttaaatttagtatgtgtcatatgattttaccattttaaaaatgcatgtgttggttcatattgttaaattgggtgctctctgaggcttgggactgtatttttttttctatagtcaacaaatctcccatgattttgtttctttgtagatgaattggggtagaggtagcagagatgaagagaagtaaacaattcctaatatatattaaaggcaaaattttggggaaatgataaagagtgaaatgtaactaatggaagaaataaatcaacaaaacaaattctttgtttttggtgtggacaattggaactatttagcaagtgatatgattaggctttgtgtccccacccaaatctcatcttgaattttaatccctgtaatccccatgtgttgagggaaagacctggtggacggtgactggatgatggggtggtgtcccccatgctgttctcataatagagaataagttctctcaagatctgatggttgtataagtgtctgacagttcctccttctcacactcactctctcttacctgccaccatgtaagacatgcctcttccccttctgccattattataagtttcctgaggcctccctagccatgcagaactgtgagtcaattaaacctcttttcattataaactacccagtcttgggcagttctttatagcagtgtgagaatggagtaataaaatgagatatggaaacataagggattctgtgcgtgtgtgtgtgtgtgtgtgtgtgtgtgtgtgatgaatcaagggtactgcttggagtatctcaagggagaagttaatcaaaaataaaatgtacatttgggagtcattaaaatggatttaatatttaagaaacattatgtgagaaaacattttgagtggtctattttcaaggcatgataaatctaagcaccggcagccagcctgcaaatgtaaaaaaccgcgtggctcatgcacctagaaggtcacaataagcgaacagaatttagaggaggggtcagcccataaaaggaagaatgttttgttattgggaaatcgaaacttaagtggggaagggaatggggtataaccttacaagggggataatggaatttaggcgatgtccgggaagattgtaactccatagtcgtcaaccagtgaggaactgggggagggacttgcatgctaagagataaatgagacctgttgtagactgcccgggatgtgcctgctcattagatacctgatcttgcaagaccgttattaaaaagcctcacttttgctgtttttagtgcctctggtccattctttgggtctggacacttgagcatgtttcccacaattggaatggctgagataaagtaggaagagagtagaaggaaaaaaaagttgtctagaaataatctttgaaatccttcaacattaagggccaggagcggtggctcacgcctgtaatcccagcactttgggaggctgaggtgggtggatcacctgaggtcaggagttcgagaagtccttcaacattaaaaaggtagagaagcaacaacaacaataaaaaagatcaaaaagagggagccaatgaaaggagaaaagccagaagtgtgatagatttattattgtgtccgctatacctctccctgtcttaaagagtattcatccctgcccattgccaggtaagttgcagagaatactttgacatctcactgactttgggctcagtcatgttatttggctaatggagaatctgcagacatgacgcacagcatatctgagcagatttagaagcactacaaatttctgccaaggtttttgttctggagccccctgccaaaagaagggtatgtcccagagagaagctgctcctttaacctgagaccctgtaagtatgaaaccagtgcataatttggagcaaagccatgccaagcaaggcacagaaactttgtaactaggcatgaggcacagaaaacatgtaattagagtcagaagtagttgttagttttcttaagtcaacaagactttgcagttgtttgtaatatagcaaaccccagcaaaagcagaataatacacaaagcaaagagagaatttcaaaaagtgggagtgaggctgggcggagtagctcatgccaaaaagctagtaatcctagcactttgggaggccaaggcgggtggatcacctgaggtcaggagttcgagaccagcctaaccaacatggcgaaaccccatctctactaaaaatacaaaaattagctgggcgtggtggcacctgcctgtactaccagctactctggaggctgaggtgggataattgcttgaacccaggaggtggaggttgcagtgagccgagatcgcaccactgcactccaatctgggcggcagagtgagactccatctcaaaaaaaaaaaaccgcaaaaacaaacaaataaaaaaacacagcaacaacaaataacctagcatccaaaacactgtgttctattaattctttgattttttttttttttgagacaaagtcttgctctgtcacccaggctggagtgcagtggcacaatctcagctcattgcaacctctgcctcccaagttcaagcgattctcctgcctcagcctcccaagtagctggaattacaggtgcacaccacctcgcctggctaatttttgtatttttagtagacacaaggtttcactatgttggccaggctggtctcgaactcctgacctaaggtgatccgcctgcctcagcatcccaaagtgttgggattacaggcatgagtcgctgtgcccagcctatatctgtttttaatagatgatctttctgaaaatactctcatggaaaattagcctcccccttacttaactagaaagcttaaaattcaaacactaatttctataatcacaaatcatcacatctacagcatttatttttaatttttaacatcctatgaaacagcaatttcccaggccatttaattttactaaattttacaggtatgtaattcttattaacttctgtatcttttctttaggctgggtacagtggctcacacctgtaatcccagcactttgggaggccgaggcgggtggatcacctaaggtcaggagtttgagaacagcctgaccaatatggtgaaaccctgtctctactaaaaatacaaaaattggcccgacatggtggcaggcaccaatactcccagctactcgggaggctgaggcaggagaatcgcttgaacccaggaggtggaggttgcagtgagccagcatctcacctctgcactccagcctgggcaacggagccagaaccatctcaaaaacaaaaacaaaaacaaaaaacaaaaaaaatacaaaaggggttggtcaaagatcagatggtggtagatgtgtggcattatttctgaggcctctgttctgttccattggtctatatatctgttttggtaccagtaccatgctgttttggttactgcagccttgtagtatagtttgaagtcaggtagcgagatgcctccagctttgttcttttctgttaggattgtcttggccatatgggctcttttttggttccagatttttctaattctgtgaagaaagtcaatggtagcttgatggggataacattgaatctataaattactttgggcagtatggccattttcacagtattgattcttcctatccatgagcatggaatgtttttccatttgtttgtgtcctctcttatttccttgagcagtcgtttgtagttttccttgaagaggtccttcacatcccttgtaaattgtattcctaggtattttattctctttgtagcaattgtgaatgggagttcactcatgatttggctgtttgtctgttattggtgtataggaatgattgtgatttttgcacattgattttgtaacctgagactttgctgaagttgcttatcagcttaaggagattttgagctgagacgatggggttagccatacgcagaaaactgaaactggatcccttccttacaccttaaacaaaaattaactcaagatggattaaagactttaaacataagacccaaaaccataaaaaccctagaagaaaacctcagcaataccattcaggacataggcatgggcaaagacttcatgactaaaacaccaaaagcaatggcaacaaaagccaaaattgacaaatgggatctaattcaactaaagagcttctccacagcaaaagaaagtatcagcagaatgaacaggcaacctatagaatgggagaaaattttgcagcctatccatatgacagagggataatatccagaatctacaaggaactttaacagatttacaagaaaaaaacaaccccatcaaaaagtgggcaaaggatatgaatagacacttctcaaaagacatttatttgggcaacgaacatatgaaaaaaaagctcgtcatcactggtcattacagaatgcaaatcaaaaccacaattagataccatctcatgccggttagaatggcgatcattaaacagtcaggaaacaactaatgatggagaggatgtggagaaatagaaacacttttacactgttggtgggagtgtaaattagttcaaccactgtggaagacagtgtggcaattcctcaaggatctagaaccagaaatactatttgacccagcaatcccattactgggtatacacccaaaatattataaatcattctagtataaagacacatgcacgtgtatgtttttgcaacagtattcacaatagcaaagacttggagccaacccaaatgcccatcaatgatagactggataaagaaaatgtggcacatatataccatggactactatgcagccataaaagggatgaggtcatgtcctttgcagggacatggatgaagctggaaaccatgattctcagcaaactaagacaggaccagaaaaccaaacaccgcatgttctccctcataagtgggaggtgaacaacgagaacacatggacacagggagggaaacatcatacactggggtctgttgggggttggggactagaggtgggatagcattaggagaaatacctaatgtagatgacgggttgatgggtgcagcaaagcaccatggcacgtgtagatccatgtgacaacctgcatgttcttcacatgtatcccagaacttaaagtataacaataaaaaaattaatttaaaaaaccccaaaaggcagaatggtcatttaagtcactctttcacagctgtgtgtaagataggtatagaaaggtgtccattagagttacgtcctgaaggttgttgtgaatttccagttcaaagctagggggtttaagagtaaacagaaagtgagaagtagacacagtaaatgtaaacatatttacagacagttttatggcagtgattctaacaaataaattggtagctggaggttcatatatgtcaataaatgtttgtttgaagacaggaaacagcatatgtcctgaaagtaatgattaatgtaaagagaaattagtaatacaggagaaggagagaagacaacctaagaagcacagtttcaagaaagaaatcgtgtgcttcaaggcctaggttaaagaattggcttttgataaaagaagggaccctgtaacaacgggagagaaagtcaaagtaatggtgcaggtaggcatgtagattaggtgatggaaagatggggaagttattgtctgaaggctatttttttctgaaagaggtataaagtgaatttattcagagtaggctaattaaaggaatgtagaggatctgaggagacaaaagcacaaaattgctatttccagagtgaggaagcaaacttgctagggaaagagggtttgaagcttgagcagctttgaaaatttctttgaggtctaggatcatgaaatttaaagtgaaactagtcatcccaggtacatgtcatttgcaagcaacttttggcttcttgagtatatttggcctcaaccagacttggagttttgctacacatgtatgtcagcaggagagaagaatgaagagtagaggatatcttccaggggagcctgtaatcatagaacaggaaatataagcttaatgaggaatgaaaggaagagagaatgaggaatagaacacagaattgaagaggagtgaaagaattgaaggtcttgatgaataattaatgcctgggtatgtagacataggctgctggacattaaatgaataattagtaatgaaggggaactactgctataccggaagttgatggtgttagacaagaaatatcatgaggccaggtaatgttttcttggacaccaagtaggatgtgactcattgtgataaaacactgttttgttttgttttgagatggagtttcgctcttgtcgctcaggctggagtgcaatggtgccatctctgctccctgtaacctccacctcccagattcaagcgattctcctgccttagcctcccaagtagctgtgattacaggcatgcaccaccacacctggctaattttgtatttttagtagagacggggttttaccatgttggtcaggcttgtcttggattcctgacctcaggtgatctgcccgccttggcctcccaaagtactgggattacaagcatgagccaccgcacccagcaaaacacttttttcttttttttccttaaatctctattccattgccaaagtgtagagaatactggtagtggcaggaggaattcagcttccagaaaaaagtacagagacagagtatttcagattaaagaaaaagtgtactgtacatttacaaaagaagccaaacgtaattttggaaatcatattgaaggggatcaagaactttatttgatttcacctgaaaaaagacttagtacctgaagttggtactttgagcatttatgcaatcaaattctaaggggaaatctgcagaaaagacatgactaaattgctacaactttgtaaagagtgataagaatatcttcaaaaaatgttgcttagctcaaattttataatttctcaaaaataaatgagtatgaatgagagaatggaatatagagaaacactttctgaaaaccttgaaccattatatattaatttttaaaaagccaataatcagaagccagctgaacccacaaacacaaaaatgaacttttggaatctaatttatatgatactttcctctttttctctcctgtaagtactatcagagtggcctcctcttcctctcatgactaatctcaagatcgaagttaaatagaaagcaacttcccaagatgcactattataaaactgagatatttaacatccccattgatatttctgtaatttatttttgtacttttttggttttagcaaatgtaaaattattttatgcattttataagtctactcatgatcttatttctcttaacattacttttctctataggccttggattcctcaaccatgatctcttctattaagattttcaaaaattaacgctaatatattttcaaaagtcatatttggtattggagccacagttactgttcacatttgtgtaggggaggaatgaggatacaagctaggtaaaatacaatgtacacacttaagtttgaatttcagataaacaacaaataatttttgtgtaagtattttccaggcaacatttaagattcaaattttatctgaaatccaaattaaactgcatgtctatatttttatttgcaaactgtgaaaaccttcaataggagagactgtcagcaacttattccttttattcattatcccaggactaccttaggttatatgactaggacaccccaaagctactaaatgttaaggaatgagcattatggtcatttcaggaatagactgacacactactaaaggaccaacaaaagaaaaatttcagagaaggggctagatcaacgggttgtagcatgtgaagagcctggtctctgatgtcagttagacctggatgagaatcactactccgaatcctactctctttgcatccctaggcatattccagttcctctgagtcattctcatcaccatgtaaaatggcaacaataataattacttttattttttattggatgaaatatagtaatatatataaaaatgcttaggacagtgcctggcacaatgtgtatcactggctgttacccagtgatggcattcaaatgacaacttgacaaattcctcatgagatggaaacagaacagcaatatgttccccaagaatcaaaaagttagttgtcaatgctgtttgtatagtatatttcttttaaaaatacatcatatttcagatttgaaatcacagctacatgtaaccattactgtctttaataatattctttcaggtacaaaggatggtaaataaatatatcatttatgtgtatacgtgtatcatatatgtcatatatgtatctatatatgtatatagtcacaaagctatgttttagaacaaataaaattcagtaaatttgtaatatatgaattctttacatttatattttaatgtcatctttattagactcatagctatcaacttgataagaaactcatagtgtatctaaatgatgctaactggacgtggaaaggtaataaattgggcccaacctaatttcttctatagaagtttactattgttgatgtttatataatctcaaaaaagattaaaaagggacttgattatgtaaaccctaagcatggatcaagtttattcaggtaattaaactaaagagcttctgtacagcaaaagaaactatcagcagagtaaacaggcaacctatggaatgggagaaaatatttgcaaactatgcatcaaacaaaggtttaatatccagaatctataaggaacttaatttagcaggaaaaaagcaaacagcactgttaaaaagtaggcaaaaagggcatgaacagatacttttcaaaagagatgcatgcagccaagaagcttatgaaaaaatgctcaacatcactaatcactaaagaaatgcaaatcaagaccacaataacataccatttcacagcagtcaatatggctattattaaaaagtcaaaaaattacagatattggcaaggttgcagagaaaaagaaacacttatatactcctgatgtgaatgcaaattagttcagccactaaggaaagcagtttggagatttctcaaagaaattaaaacagagttaccattcgacccagcaagcctattactgggtatgtaccaaaggaatataaatcattctaccaaaaaaacacatgtatgttccctgcagcactattcataatagcaaagacatgatgatatcaacctaaatgtccatcagtgatagactagataaaatatggcacatatacatcatggaatactatgcagccgtaaaaaaatgaaatcatgtcctttgtagcagcatatatgcaaccagatgccattatactgggaaaattaatgcagaaacagaaaaccaaacaccacatgttctcatttataaacgtgagctaaatgatgagaacacatggacacaaagagggaaacagtagacaccagggcctacttgagggtggagggtgagaggaaggtaagggttgaaaaactacctattgggttctgtgcaactacctgggtgatgaagtgatttgtacaccaaaccccagcaacacttaatttacccatgtaacaaacctgtgtatatgccccttatacacaaaataaaagttgtaaaagaaaaaaaaatgaataaaataataaagaggctagtgtatttagctagataagtgagagtcacacaaatgtttaaaatattattttgctcgtattctccttgtcataatttgattgaccttcacattatgttttgttgtcagcaacacaaatggataggctaaaatatactatatttgaagttatatgtaatacttaacatggctggattgaagaataatcttgctattgaagcagtattgatggaaaaactttagaaactaggagctgcattaacattttaaagaaaactattcaaattcctaaagtagtgtgcaatattagaaccactaatattgcactatattaatattcccactaatattccctaattaataagggaagaatgtcacttctctatcctgtaatattttggctgcatctcaaataatactgagcttttacattgtcatttgaaatgctaattcgtagctaattgttgtcattttacacttagttctatttggtattgtcagaggaattatttaaaagtattgaaattcaagatgcctggggattaaatagaggaactaataatttcaagactcagtaggattttgaaatttctggcagatattatttctaaaagatgcattgctttaattggagattttcattttaaatgattttatggcagattttgccctgcggtttataaattcttgaaggagaacaaaatcttctgttttcttggagaaaaaaaaaaaaacttaattgaattaatgaactattggattcctcaggttactttgttgtcatggtaacctaagttttcaaaaataaagaaaataagatgtgtcataggtttgagtttacttttattattaaaactttatcttccacagcacttaggaatccaatgttcttgtctttaatctagcatctaattccatagtatttctggtagacattttaatgagatttctgtttgcagacacacaaacagaaaaaaagagagaatatttgctcagactcgactaaaaatatatcaaagcagtgggagacaaaatatgcttttatcttgtatttcctaaaaattgtaacactgtcctatagtgctggttcctgaacagattatcctttaattttataataatcacatttttctagtgttgaaaggcacagttttctcaagtctttacatttgcttatctaggacccctagatacctaatggaagatcatgacagattattaaagggtgtttggctaagctaatctgaagaattaatttggttacaatgtttttatcatatttctttaatttttttcaattgtaaactttaacttcctttctgaattaaccaaaatgtcacctcttcatgaagatacatgtcatgaattattctacacaatgcctcacactaacaaagcattcaaaaatataaaatttatgaaaatatcttaaatattcaaaaccctcaagatctaatatttagtgataatgaacaataggtcaaactctgtgttaaatatccaggagtacattaatgaataaatcagttcctgctctcaagaagcttatgggccaggcgcggtggctcatacctgtaatcccagtactttgggaggccgaggcaggcggatcatgaggttaagacatggagaccatcctggccaatgtggtaaaaccctgtctctactaaaaagacaaaaattagctgggtatggtggcatgtgcctatagttccagctactcaggaggctgaggcaggagaattgcttgaatctgggaggcgggggttgcagtgagccaagatcacaccactgcactccagcctggtgacagagcaagactgtcaaaaaaaagaaaaaaaaaaagtttatggctaaaagggaaaaaaagacaattaaaagagccattaaaacactgtgattagtgatatagtattcaacctcaatgcatgatggaagatttcccagagggcacaatttataagctgagttctaaaatgtaatcaggagaaaaacaaatggtgctggtggaggggtgttggaaaaggaaataaagatctttggtgacaagctcgtaaggtgcattagaaacttgtttccacatgtatttagaatcaatatctttcttttttcttttttctttttcttttttttttttttgagatggagtctcactctgtcaccaggctggagtacagtggcacaatctcggctcactgcaacttttgcctcccgggttcaagcaattctcctgccacagcctgccgagtagctgggattacaggcatgaaccaccactcctggctaattttttgtgtttttagtacagacaggttttcaccgctttggccaggatggtctcgatctcctgccctcgtgatccacctgtgttggcctcccaaagtgctgggattagaggcatgagtcaccctgcttggctttaggttgtgatcagcttaaaataattggtataagatagtatttgcaagcctcatgttaacctcaaaccaaaaagcatacaatggatatacaaaaaatatgaagcaagaaactaaatcatactgccatagaaaacaactttcactaaaaggaagacaggaaggaaataaacaaagaagagaatgccacaaagcaatgagaaaacaaataataaaatggcgggagtaagtccttacttatcagtaataacattcaatgtaatggactaaagtctccaatcaaaagacatagagtggctgaatggatgaaaaccaagatctattgatttgttgcctacaagaaatacacttcacctataaagatgcacctacattgaaaatagagatggaagaagaaactccatgccaatagaaaccaaaaaagaccaggagtagctatatttatatcagtcaaaatagatttcaagacaaaaactataagaagagacaaagaagatcaccatataatgataaaaaagtcaattaattaaaaagatacaacaatttaaaatatatatggtatccaatactggagcacccagatataaaagcaaattttattagaggtaaagagagagatagattctaatacaattatagctggagtcatcaacgccccactttcagctttaaacatatctttcagacagaaaatcaacaaagaaacattggacttaatcagagaaatgcaaatcaaaactacaatgagacaacatctcactccagttaaaatggctcctatccaaaagacagacaataacaaatgctgatgagaatgtggagtaaaaggatcacttgtacactgttggtaggagtgcaaattagtacaaaacagtttggagcgtcctcataaaactaaaacagtttggagaaaaacagtttggacggtcctcataaaactaaaaatagagctaccaaacaattcagcaattatactgctggtacatacccaaaagaaagaaaacaagtagatcaaagagatatctgcactcccaggtttgttgcagctttgttcacaacaaccaagatttggaagcaatgtgtcttcattgacagaataatggataaagaaaatgtggtacttagacacaatggagtaaattcagccataaaaaaataagattcggttatttgcaacaacatggacggaactggagttcattatgttaagaaaaataagccagacacagaaatacaaatgtcacatgttctcacttatttgtgggatctaaatatcaaaacaatggaacccaaggagacagagaatagaaagatggtaacaagagggcttggaaaggtagttgtggggtgtggtgagacagaagtggagacggttaatagatacaaaaatagaatgaatgaataaggtctagtgtttgatagcacaacagggactagggtcaataataatttaattgtaacattttaaaataactaaaagaatataatttgattgtaacacaaagaataaatacttgaggagatggataccccattttccatatttgatgattatgcattacatacctgtataaaaatatcttatgtaccccataaatatatacactgaccatgtactcacaaaaatttaaaaaaaatttaaaaagtaaaatgagttggtcattcttagcaaaagaggagaaaagagggggtattggaagttttagaagtgaggcaaacaatgaacaatgacactgaagaatgagactttgatggccaaccaaatgaagtagtttatgttgagttctactaaatatcaccaaacaatctattaataaaggaaagcaaaatttactagaattttcttcattgggtagcacaccaccttaatatagtcttggtattgttttgggaaggagagttcagaagtggaatatttataggtcattgttatataagatgaagttgttgaagatgagtctggaaagatggggaactaattaggtttagacaaaattaatgatataatagtttagatttggtggacacagagaaacaagggtgatgaagcaagtcttgataaataaactatgggtgacaaacaagttattctctcaggtgaacagtctattgcctctaataaattgatctttggaaatttacataaacaaacaatgatttattggtttacatctttatttttttcttggcaaaatttcctggaacaaacaactaactcatgttgacacaggtaatatacaatctcaactaagtcatagtgacacacgttgtttcaattcttcacctctacatgtcatcattttccagcccaggctaaaggatagaccattatcatctggggaaatgatcagttcaggtctatataaattctttggaaagtcataattacacagcaagtttttgctggtagtcatttcaactgctatatatgtcaggttttcttgttctttttggcaggtcagttttttggattacttgatggagcagtggctgaacaacagcatttaaaccatgccacttagacaaatactagaataattataatcaagatttgtagctgactgctaaactgaaatccaacagtgcctaaattaaaccaagataacagattccatccccaatatgaagagcctgcagaacaaatatgaggctattagttaattaatttcatgatttcctcatttatttgtcatcttcttagtagtattaaaggtctcataaaaatctgtagggatgctataacaattattcctctgaaatagcacatgtgccacctcaattattcctctgaagtagcacatgtaccaccatgtcaatattctgtctaggactgctctattttaaatcaacatgttccaatctcataaacttcttatgagagcaaatctatgcgcttactgaggttgtttagcttctctttcaattattgaactatgacagataagaatttccttatattctatatctctttcaaagaataatataaaaagtcttgaggacagaaaaaagttgtctagaatttttcactgaataagttaggaattgaacctctaattgaggccagtttttcttttcttaaagcaagctatttttcaaagaaggagaactagagggtcaaaatggaaactgtgttattttagagactatcctgcagacagatataagtatcctgagataagatcttgtcaggttttctggtagtagccaataacctttttttcgtgtgtgggggggcacacaaattcaataatagtcattgatttctactaaatgatgtgatcttgactgaaatagcttaatggagtatctcgatttcattatatggtttcatttctattcagaagtagttaggtactaggcagaagaccataaagtgatgacattattaaatagattaatgattcaatctgataggaaatcagttttttaacttacataggaagccttctttgtaaggtctgtaaatgtaagaggtaaactataaaacatgtatttcctgtttttcatctgagcctaatccctataaaagtttgattatcaggtctatttattacaaatggatcttggctgttattttcgtgaaaacagaaacctcttcttgtaggtattgtacgacagatggttttacatttttgtttacctgaactattatgctatttgctagataaaactcatgttatggttcagtctaataattagtgtaaacaaatgtgttttaggcattaatacttaagagaactgattaacattcagagatatgtacaaatcagtcagtttgattgtacatttgtccaaatcatgaaaagtatgcagccagggattggacccataccaaagagtaattaagaatgcataaagacgtattatatataaaattttgtaagtattacattaaaaataacaagtgtttatttaaaatataaaaccttaactcagcaaaaaggaaagaaatcaactaggaaaacaaaaaacaaaggcatgcatggcaatctgcagccccagtgagctagatctagttctgtaggtttggggtggatgttttctacatcatgctgttgtcttcttgatctgaagctcttggtttgaagacgtcttcttctgactatctgcttctgaaacattcttaagaatccttatgttaaatctctcaatggaatggcagtacagtacaaaggaagtttgaaactttgtgtgatttttagcaagggcacatgaatccaaggatttacactatggagttaaactgctgtgttagtggttagaagtacctgacaccattgttcccaatgtagttccaagacattttttatcctttttcagaagataaagtctctgagttttatcacatagaatttgtttaggaggttgtgaaggaagagcaatttgtatatgttgttgataagattaagtatattgcacgagttcttcaaagaactttgctatgccttgatgtctgatggaagtaatttagagtccaaaattagaagagaaatatttaacctcttatggtgatatgtaataattttgatgatattttatgggtctcagaggtaaaggatttcatggttatgaggacattgttaggcaacaagccaaatagtgatagacaattttactcatttgaatttaagcatgacattgtctctttctactttcctgaggattgagagtgatctggaccataaagttgtttatgtggcaaagactttaaagttctataataacagtcccagggaaatgaatatttttatcactggagagataagttggaattccctgtgctaggtacataaaattagttaaacttttgctactgtctgagccatagctctttggtaggaacagcttcattttatcctgagaataatcactgatctggacatattaaaaactcattagaaactcaatatggaacctatttggagtttttcaaagggactgggaaacttgcgttcttgaccatgtcttactcttacagtttaccattattaaactggtgacagataagataggcatcagagacacactaaaaaatgtctgtaatattctcccttcctctaaccaagcattgactgagtacaaaggccaatctgtctttgatcttgtgagtaatatcatgtaaaattttacaaagttccacttgaaggtctctggtacacccaaggagttatattgaaagcgctaggagtgtcctcatgtactttgcatacagatttatctcaataaccctctgtcattaagcatatggtatatatctctatttttttgtttggtgagatatttttattttggaataaacagtatcagtagcaataaactaaaaaaaagaaagtgcatgtataatgaaatcttatggtctgtctctttctcaataaagttgataaagaatatttaagctatataaatatttgacaatatttatcatccatcacagaggccataatatatctctgaccatgtggaaacttgaaaatctaagtatcctgaaaaacataaatcatcatctgttccaaactttattagatacttgaagctccagaaggtaaatctagattaaaaattattattttgaattaattttgctcaattttaaccccaagctttttttcatgtacaaaaaatgaaatgttagatattaatgtatcagagcgattagcggaattttgcaggcagttaaatgatgctagttttcacataaacatcattagatgcttaaaataggaaatcagttaatttccataatgattcccttttaaaaaacttaatttcatggaatcaaagtaaatcttttggaagccgattctctcatagtttatatgtttaacattattatattgctattgtaaatttagttgacaagtttgaaactctatttaaaatggttattgcagtgatactgtagctaaaattttttgtgtagagaacagtattgtcattaaaagactgctataactaaattaagaaaacgacaaagtgaaaatttacttggtatttttacgatacacattaatttgccaaaatttgatgaatattttaaacgtgtacacacttagagtaacaactgcaagatgtctgtgacaaaattgatgttgagtacaactaaacacttcagcctgccaataagtttctttctctctttgctgtccagcattgttcagacttcagaaatgcttgagtctttgaagaactgccttgtcattcaacctaagtatcttactgtggtaacaaacttttttttttttttttttttttttgagacggagtttcactcctgttgcccaggctggaatgcaatggcatgatcttggctcactgcaacctctgcctcctgggttcaagcgattctcctgtctcagcctcctgagtagctgggattacacgcgcatgccaacatgcccggctaatttttgtatttttggtagagacagggtttcaacatattggtcaggctggtctcgaactcctgacctcaggtgatccacccgcctcggcctcccaaaacactgagattacaggtgtgagccactgagcccggccggtagcaaacttttaaataatgacttccctaaatcttggttacatttccctgaaaaatcaatgagaaatcttgaattaaatattcaacaagtggaatgccaagagtctccatcttttggagaataattgaaaataaatcttataaacagaattattgaaaataaagcttaaaagcaggattgtttggaaatttctcaatataaaagcaaaggaataaatgaacaatttaaatagtaggagttcaaacagcaagtaagatttagtttgaagttctagaattgctttcggaataagctgattttgatggaactcccattttcgtggactaatttagattctgtacaagaatagaatgaagcttgagaaggcctataattttgcaagatctaaatttggcaaaacatctaaaacaattataaatagcaatgagttacttgatcagttttttacgtaaaatatttttcagacaaattctctgactgcaggtaaaaaagatgtgcttgcaaaatatttgtgattactcatttaaatacaaaatattgaactaagaatgtccttcatttggtagaattcactttgggtttatcagttgttccatccctataaaaagaatattttcctaataaaaatcattgtgattacagaaaatattctattgatgatagcaacaatttcaaatttattcacattatatttggttttgaagaagactgcagaaaattttacaaaaaaataaatatatgaccattgaaatacagtatttggaaaaatgccagtgacatggttttgggatagatacaactaagaaactgattaaaagtacatgcatatgtaccaacaaggtttacactgcttattttattttttaatattctgatagccaagataaagtagatttccccctttttgtacatttttatatgttatttttactttctaagtagaattttattttaaaattagttttaaatgaaaatatataggtccaccagtataataaagccgaactttagcacataaatatttcaaatatttatattagtttaattattttagagacctatatttactgttggagttgcttcagttcagataataaataatgtggtctctctaactaatggtggtaaataataaggaaatgaaataagagatggaggcaggaggcaaaatatgaaactgaaggtgagggtaaggggttttgattctgtggaacagacagactagggaagagctacttctcttacaatttgaggtgcaggaaattgagctaagattgagtttacctatgcctggaatattctattaacacaataaggttctagtttgaacatgaaaataatgacgataattataatgttcttccaaactcttccaatacttttaattaatgagaagtttagtaagaataagctttttgtctgaaagcttactatgcatcatattttagttcattacagcattgcattgccagcaccttatcagtaaattaatcataatcccatacgattttgcagtctgataaagaacttacatatgtttacccacaacgtggtactcagacctgaattcagctgaccatcctcccttctttttctatttgttttattggacttaaggcatttgacaattccttttttttttttttttttttgagacagagtcttgctctgttgcccaggctagagtgcagtggtgtgatctcagctcactgcaacctccacctccaggttcaagcgattctcctgcctcagcctcccgagtagctgggaatacaggcatgtgtcaccatgcccagctaattttttgtatttttagtagagatggggtttcactgtgttcgcaggatggtttcgatctcctggcctcgtaatccacccgcctcgacctcccaaagtgctgggattataggcatgagccactgcgcccggccaacaattctttttccttatactgtcttagcataatccttctcactcaggtgtttgctgcttaatctgtatttggttttagaatggcctgggcataaatgtgacatttattcttatccagtaatttttcagccagccttttggcttaattttggctctactgttctatgagaaattttcaatatttaagcagcaaaacaacaatttcaataggtgaatttcaacttattgcttcttgtctcattttttacctttcttgccactgttaaatacattgggaatctcttttttccttccttattttcctaagtataggcagtcccagggtatcctgtagtaaaaataatttttatgactttcatatcctaggtttgtcttaagtggcttcatgttatattaaattattgatatgtaatattattgagcactgtctacattccagattattttctatgagttttacagttattaacacattttacagttattaactcatttttcaaataacactataaagtagatgctgtcatcatcctcattttacagataaggaaacagttaccacttgtttaagaaatttccccataggcacagatagtaaatgttcatgtcagaatttaagttcaggaactcttgtctagtatactatactgctttttacatttaattcaggtaaagaatggctaaaaaagaaagaatggagaattaacagaatgtagaaccaaatagggcagaagcagtaatcccagtgaaggagctaatcatcagttatttgatttaaataggtatgtgtcgattttagaacattttctggcaaataataaacattccagagaagtgtcaaaatggtgtagaactttggggatcaagtttctacaccgtgatggttttagaagcataatattggaaagatccccaacccaggataggtggtttcaaagctagaaggggaaaatggggacaggccagtccctaagcaatagggcttagagaaagaagaaaagagagcatgcatcattcagtaatctgaggtacctatcaggaccctcttttttcaaggtagaaataacctggaagacaagagtcaaggaaagctctgaaataacaaaggcccattcaggaggggctcaaataggtggcttcctctagaaacattccagtgaaactactacttattatctatgttcaatatttgttggtatagcaggaaacttccacatttttgttactgattgcaggctcatcataatcagctaggataaggctctgattgtgataattatgataatactaagaaaactttattatgcatgcaaaataatcatattccaggcatctcaagtgtctcaatattttgttaatgtaaaataatgtaaaattccaagaaaatagtaaatacccttaatagataatcatgcacatttattgcatatgctaaaaaccagattttccataaatgctgactctttatatatgaagttttcagtaaattgaatatgtatgataactaattgtacaaaaatttcatttctaaccttatagaatataaaccaattttaatctctttgaatatatttcagctcgtatatataatagaacaaatggaaaaaagtgagataaaggagtctcagaataaaaaaacaattttttccttaaaattcaattatgtaaaatgaatttgctttgcaacaagaaaatgttccacttttagcctgtaagagcttaacattttggcaataatagctgtggtgcacaaaataatactatttgagcaagatcaagagaagggacatcctcaagggatgtaaggttctaaattctttggaaattttagatgatttcataggcaaagtttattcattgactgtatgtcacatgttttcccattgtctgaggcaagtaatatatataatatttgtgttaaaatgggtttctttcgtatatatacatattatatctattgtataagatatataataggaagaatgttaattattaggctataaatattattacagcttctaaatacatatcattataatttaaagtctttcaagttttttgttgttgttatttttaaactaacgatatattttgggagccgactatcacttttaaaatacaatatgtagacagaaatatttttcttcaggtgaagtggccctaacaaaaatataaatctctgttcttggagattgaaataatgtgagataccatttttcacctattagattgcagaaactaaaactcttaatgataccctgtattggcagggatatactgggcgaaaattcactcttatatactgtttgtttgaaaacgattggattggtacaatttgttggagaggcttttgtcaacagactaatcacttaggaatgttttggctgcaagtaacagaaaatttgacaatgtggcttgaataaataagggtttttaaaaaatacttcaaacaatatgaagttaattgctggttcagcaggttgatgataaccagcaccacctcttctgtgatttcattagcctgcccctcatgcatgtcaccccatgggctccaaacagctgattcacacattttgttgactcacacatttttctctgttgccaaaaacaaagaaaaggagaaagggagaagggctatgccagcttttagaaaaagaaggagatctctagacatttcccctcaaaagacttttgctcatgtttcaagggtcagataaagtcctatggccattcctagatttaaaggagactgggaaagcaagaatttgatttcctgttgctctagtgggaggtgacaaaggagaagtaggttgaggatggctttacaatgaccaattaacagcatctataaaattataaaaactattttaagaaatacatttcctttgattcagcaatttcacattcacaaatgtattcttcagatatattttcaaggatatagtacaaaatgttcaatgaacgtttttctggttgtttggaattgtataaagctgaacatttgaagaaaattgataataattacttcaagatgcatcatttttgccccaacacacacactcatcaacagagcttgaaaacataaattgttcccctggctcttgctgtagatgggttttctctctcatccaagaaagagggctcaaaaagatttacttgtaataggagtgacagtaaaaattataggagaacaagatcatacttcatagcaggatgcttgctgagttgcaaaaatttgtaggcttatatttaagataggcctacaaaaataaattagagaattagaatctcttgaattgtggtgtttggagctcagtgtgaaaggtgtcataatgaaacaattgtttcatttatgctgggggaattctgaattatggaatctggctgattgtaatgaaaaaatacaatcctttctccttatgtttcaaggtaggaagcattaaactagatcttcatggtccaatatggtagccagtgacttgtacctctcatgagtgttttttttttcttttttcttttttttttttaattatactttaagttttagggtacgtgtgcacattgtgtaggttagttacatatgtatacatgtgccatgctggtgcgctgcacccactaactcgtcatctagcattaggtatatctcccgatgctatccctcccccctccccccaccccacaacagtccccagagtgtgatattccccttcctgtgtccatgtgatctcattgttcaattcccacctatgagtgagaacatgcggtgtttggttttttgttcttgcgatagtttactgagaatgatgatttccaatttcacccatgtccctacaaaggacatgaactcatcattttttatggctgcatagtattccatggtgtatatgtgccacattttcttaatccggtctatcattgttggacatttgggttggttccaagtctttgctattgtgaataatgctgcaataaacatacatgtgcatgtgtctttatagcagcatgatttataatcctttgggtatatacccagtaatgggatggctgggtcaaatggtatttccagttctagatccctgatgaatcgccacactgacttccacaatggttgaactagtttacagtcccaccaacagtgtaaaagtgttcctatttctccacatcctctccagcacctgttgtttcctgactttttaatgatcgccattctaactggtgtgagatggtatctcattgtggttttgatttgcatttctctgatggccagtgatgatgaacactttttcatgtgttttttggctgcataaatgtcttcttttgagaagtgtctgttcatgtccttcgcccactttttgatggggttgtttgtttttttcttgtaaatttgtttgagttcattgtagattctggatattagccctttgtcagatgagtaggttgcaaaaattttctcccattttgtaggttgcctgttcactctgatggtagtttctttggctgtgcagaaactctttagttgagtgttttaaaatgtggccagtcctaatgaaatgtgctgaaaatgtcaaatgcacatcaaattttgaagacttagtacaaaacaagagtattagacatcattaatatttgtatactgattattctatgaaatagtaatattttgggatactgggttaaataaaaatgtattactaaagttaattttacttgtttctttttcctttttaatgtggttactagacaatttaaaactgtatatgtgactagcacttgttgttcatattgcatgtatagtaagacaaagctgaactagataacgttttgcttctctcttcatttctctcatttctttatttggaaagaggagaatttatctgatgagcctgcacaaagtttctgactacactaactactctttctccagtctttgggaaccag

SEQ ID NO: 16 - DNA, 6012 bp, Homo sapiens
caaagtctgagccccgctccgctgatgcctgtctgcagaatccgcaccaaccagcaccatgcccatgactctggggtactgggacatccgtggggtaagcgagggtcctctggtgggtgggacagggggcggaggcggggatgtgtggagtagctgcaggactggctctagggaccgttcctcttcagggctgcccgcctcagaagggcctgtgcatgacgctgtgtgtgtgtttgggggtgggggcgggtagaggaggcgacgggtacgtgcagtatagactaggggctggcctggtgcagagaaagtcaccaagtcagggaccctccatctctgacccgagccgcgggccatctctcccagctggcccacgccatccgcttgctcctggaatacacagactcaagctatgtggaaaagaagtacacgctgggggacggtaatggcaccctcgtgtccgggccctgcccactcacgctgagttggcaccaagcaacccatggtggccacctgtggctgcctctgcaggcctcccctgctggagctgcaggctgtcccttccctgagctcccgtgagtgagccctctggccttgcaaggcagaatgctggggcgggatgctggacaccctgtctaattgggttgggtgtccctcagagcttccctaaaccctggaagccttagccgttgtggggtccagagccctcagtgggattctttctccctgaaccctgggatgtgggactgagtggtcagattctagatccacctgtctcagggatcttgccactggctccttgggagggtccccgggaaggagggctgggctctggggaggtttgttttcacttcttccccaccacagctcctgactatgacagaagccagtggctgaatgaaaaattcaagctgggcctggactttcccaatgtaggtgcaggggaaggggcggttttgggggaaagtgcgacgtgtctctgactgcatctcctctccccaccttagaggtgttaagatcaggagtcttctgcccaattcctctcactcttggctgtctacacagcccttgcatgatgttctgtgtcccagctcatttattagtgtgacagtatttctatctcaggcctgccatgagcaggccctggtctcctctctgcccttgcatatgggaaggggatgctggggagcctggtggcccaactgagcttccccggtttcccatctatccagctgccctacttgattgatggggctcacaagatcacccagagcaatgccatcctgcgctacattgcccgcaagcacaacctgtgtgagtgtgggtggctgcaatgtgcggggggaaggtgacctcctccttggctgggctgtgatgctgagattgagtctgtgttttgtgggtggcaggtggggagacagaagaggagaagattcgtgtggacattttggagaaccaggttatggataaccacatggagctggtcagactgtgctatgacccagattttgtgagtcccacaccccactcccagtcacccatttccctgccttttggcccagaccagggagggacttccaaagtcaggtctgtagcagactccggccagctgactggagacgtctataacctggttctccaaaatgtccacacgaatcttctcctcttctgaagattcttgtggacattttggagaaccagaccacggacaactggatgcaactggtcatgatctgctaccacccagagtttgtgagtctccccagtgagctgcacctggcagagtttggatttggggccaggactcttgcattcctgcacgcactggtcttttcttaagtccttggtaccactcatcctccaagtgctttcccatactatcagcagttattctcacgactccaatgtcatgtcaacaaaagcagaggcaattcccaccaatcttaggacacgatccaggcatcccacggtggaaattcaattcctagatggtaaaatttgtgttcagaatctccttcatctcctctggcctctggcctctgtcatgggtcatttctgtcagttgatttatatcacctacctgctcctagaatatacagactcaagtacaagaccaaggaatgtaatggcaccctcaaattgcatcttctcctcaaagttttccaagtgctgtcattgacatgcaccgggatctgcgcattttcataacagacagctcagaggcagccagagggcctttattcctctccctccttcctttcaacttgaacttctcatctccctggaaactagtcaatgttcattgttttcttctgtcaccccattagaaggaactttctacttctttccctgagctcctttagttctttgcatccttgattctgcccctgtctggatccagaggctgccaggtgctcgggcgctcatgcggctgacccagaggctattgggaggccagtgaggacagattcaggaagagcatctcattctgatcacttcagatagggtctggcacccagtcagagtctaataaatgctgatgtatccaattgaagcctgggcactgccccggttttagttgtggggaagatggctgcttgcctgtggccagcctgggccatctacagccctggggaggccacgtctgtgcagggagcttttgtctgagggtggtgacagctgttttctgcctcaggagaaactgaagccaaaatacttggaggaactccctgaaaagctaaagctctactcagagtttctggggaagcggccatggtttgcaggagacaaggtaaaggaggagtgatatggggaatgagatctgttttacttcatgtgtttcggggttttcagcccacacattcttggccttcttcagatcacctttgtggatttccttgcctatgatgtccttgacatgaagcgtatatttgagcccaagtgcttggacgccttcctaaacttgaaggacttcatctcccgctttgaggtgatgcccccatcctcctttctctttgatgccccttgttcctttctctcctttcagatgctttcccagtcctggagctacacaaagaataactcgtatgtattgagtacgggcttcatgccaggaatcatgcccagcacattatacctatcgtgtagaatttgaaatttccaacattcctacagggtgacagaattatcttgcccattttagagataagaaaactgagaatgagagggtcagtcctttgctcagggtcccagagccagtggaggctgtgctgggctccctgtgagcctctggatctatgggtggcagtcagggctctcccatttgtgacaaaaggagaagcctcaggcctcatccagcctgggtttcacagcccagaacactttgaaagaggcagagcacttcaggaccacggatgcagctggcaatagtaggactgacacacagtggcattgatgttgagtactaaacctgcaggcagtattcatagccacccccagaagctttgcatgatcggacccccatgtggaaaatcctgagatccggagctgtggctggagctggattagggtacatatgtgggtgcccctgttgaagcagtgtgtgttgaagtgctctgtgctggggcactctccttctttatctttcttcctctctttttttccctccaatgttccacgtcttccccctgtgagatgagtagcacactgattttactcctattcaccgaccttctcctctgcatgaggcagggtgtgaggcacagtgggagttgcatagatgactgccccatcctggaaatgagtgcagtgagaggcctgcaggcagagcagcctgtgaggtgtgtgtggcaccacctgggtaccgggcctggggcctgcccctcactcacggggaaccatccctcacctgtgttgaagttgtttgagagcagcaaatcctactttagtacagatttggggatttgaggcattagtccaacaggcttctgagcctagaatctgtttccctttcccactccccatcaagaaatctgcttgctcagctagttcccatcagctctggttctggtccagcctgagcagccttggggttatgtaagaggtggtgggaggggagcggtggggaacagccgagggctggggcatggagcctgcctgggcctggccctggccctttggggagagggagccctggatctctttgaattctttagaagttacatggtcattgaatcctggtaagattgtgtgcagcacacctgagtgtcatgtggcctggctagcagtagtagggctggagatgtgatgggggcacagggacatagggagatttagctcaggtaccaggtggagaagtttggactttatgctttaatgggaatgattagagcctggtctggccttcctttggtggttcacccttaccctattcagtttcatccaggttttgctaagtcattgggtgagatctgtgctctcttcttggctgcacaggtgtgttctgagcccctttgttctgctggaggtcctttctgtgtgtgcaatcctaggcaagccaagaacctccctgtgaaaaaggagaatgtttgtgccgacaaggagtgacaggatctggcatggggtgtggctgggtggaagaggaggagaatttggcaaaaacatgctagaactgaagacagaaccaggctatattccagccctgtcccacttactagctatttgagtgtgaggaagttgctgaacttctgttcttctatatgagaaacggtgataatagaactgaccatggagggtagtcgagtggattttctaagcctgtgttgtaatttctgttggatataaagcacccagcacagtgtagatctttcgtaaatggtagctgttattatggtataacattacttaaaggaagttggaagagttaacttagaagagctggggacctaagagaccgtgtgatgctccagcacttgagcccacatggaaaggctgtggccagggccctgacctgctgtgcctgcagcaaagctacttgagcccttctagacagcagacctggctctggccccttcttcccgccctcagggtttgaagaagatctctgcctacatgaagtccagccaattcctccgaggtcttttgtttggaaagtcagctacatggaacagcaaatagggcccagtgatgccagaagatgggagggaggagccaaccttgctgcctgcgaccctggaggacagcctgactccctggacctgccttcttcctttttccttctttctactctcttctcttccccaaggcctcattggcttcctttcttctaacatcatccctccccgcatcgaggctctttaaagcttcagctccccactgtcctccatcaaagtccccctcctaacgtcttcctttccctgcactaacgccaacctgactgcttttcctgtcagtgcttttctcttctttgagaagccagactgatctctgagctccctagcactgtcctcaaagaccatctgtatgccctgctccctttgctgggtccctaccccagctccgtgtgatgcccagtaaagcctgaaccatgcctgccatgtcttgtcttattccctgaggctcccttgactcaggactgtgctcgaattgtgggtggttttttgtcttctgttgtccacagccagagcttagtggatgggtgtgtgtgtgtgtgtgttgggggtggtgatcaggcaggttcataaatttccttggtcatttctgccctctagccacatccctctgttcctcactgtggggattactacagaaaggtgctctgtgccaagttcctcactcattcgcgctcctgtaggccgtctagaactggcatggttcaaagaggggctaggctgatggggaagggggctgagcagctcccaggcagactgccttctttcaccctgtcctgatagacttccctgatctagatatccttcgtcatgacacttctcaataaaacgtatcccaccgtattgt

SEQ ID NO: 17 - DNA, 61826 bp, Homo sapiens
cctcggggagtggtccgaccgcgggcggccgccggtgaggtaggggcgggaggcggggggagacatggctcggcgcggctggcggcgggcacccctccgccgtggcgtcggcagcagtccccgagcccgcaggctcatgcggcccctttggttgctcctcgcagtgggcgtctttgactgggcaggggcttcggacggcggcggcggagaggctagagccatggacgaggagatcgtgtccgagaagcaagccgaggagagccaccggcaggacagcgccaacctgctcatcttcatcctgctgctcaccctcaccattctcacaatctggctcttcaagcaccgccgggcccgcttcctgcacgaaaccggcctggctatgatttatggcaagttcctcaacccttgtcagccccttggcgctgcccctttctctgcccgccggctgcttcgcctcctctgctggccctgctcggcctacgttcggctccccttctaattccttccattttctgcctcgccttccccctaccccgcgtttctctgcctcaccccctttcctcttcagcctcgcgccccattttatctgcctctccacacctttttcgcttccgaccccaccccctttttcctccgcacccccagccccccaccctttccctgcctaccaagctcgggacccggggctgaggatggaaaacgagtgggcgcggtgtctggaattgggctgggggctgggggaggggagacaccattgcgatccatttctctggggtgtcagtttgtttaaggttcattgaaactgcagtagtatctctactgcccagaatctggcgttcttttggagccagagtcgacctttactcaacacctagctcctgctacgccctgtcctttcgaggttgcaaaggaaaatcttattcttgtggagtccgaaaaaaaaaacccgaacgtgaaataggctacagaaggcttagggcatttttaatgacatcccatttattgtactatgcctctaatatctgatatggatacctgtggttgacccttccaattcaggcatacaaaagtgaggacgaggaagagttaaggtccttccagaagtatagtgtactatacgatgatcaggacagttcagacaaacagtaattacaaacaccatgcatatgcagtatgggtgacttgctgttggcatgaggttattgaccgattgtagaataaatggcttcgattcttgtgtctcagtctgctttctgaggtttattattattattattattattattttggtgacaaggcgagaaggggtaaatcaaagtgtgggctcagaggcattttgagctgtgctggggcctcaagaggagaaaagatacatattgccgactgtattaatctgtgcgggtattgctaaagagatgagggcggacaaacaattctttctgtgcagtacatgtgtgaagattatcttcatttggagcagttaaaccgatgagcttgttgaggtttgtctctcagacttgcagataggtagatgaagctttggcacaaaagacattgctccatgcaaacccccgccccctagtaaatccagacttctgtaatgtgcatctctcaaggatagcaaggaaaggtagttgtgtgcctcaggaagatgcatgaactcaggcttatttttcatttttaagagaatacagttctgagcctgcgtgtaaaatatctctgctcactaagattcctagtttttagacatattagatggtttttatatttaatatgttttgcatttcatttgcagtgcaccttaagccaaattggccagataagctatatatttctatataattttctgcataacagtgtgtgatttatttactatcctcaacaaacatttgttgataaaccttctatgtattatgctcagaaaatacaaagaggtataagatctttgccttcaagtcacttataggcaggtcatataaagaaaataatggcatcttaaatttggttaaatgccaaatgagtattataaagtaatgaactgatcagagatacttcttttatagagagagatagtatgatgtggtaattaaaggtacaaggctttagaccagaggtcagcaatttttttttttttctgtaaagggccaggtagtaatgattgttgatcttgtggatacgtagatctctgtcgctgttgcattttttttctttgatttttttttctttttataaagttttacaacataaaaactattcttagctctcgggccatacaaaaacagaccaagggctgtagtttgccaacccctgctttagaatcagacctagattcccgtcacactctgcccataggtatgtgtgatcttagacaagtcccttactctcttttaccatcatctatatgttagggatgatgatagtaggattactgtgaggaagaaatgtttttagactagtaactgacccttaagtaaatgcccaagaaatgatagctgtgctattattattattattgctgttacaactgcattttctcagattaggcccagaacaactcttttaattggtcagtctcataagtcaagggacaaatacagtctttttaagagaatcaaataggggctttgaattgccctggaaatattttctctttggtagctggtatcattaacctcatctaactctaggactgaagtagaaaaggattaccgattgcattttgtgaggtttctaagttaataaaaagtgatagagcaccttggtgttagtattttttgaaggaaaaacaagggtatctcttgtggaatgtaaagtgcaagagtgttagtctgggagtcaaatctggagttgacttggcgttctttagcctgtcctattttctcattgtgggcaatgggtgctgtggaccaaacagcctcctaacttaactcgcaagtccagttcgagaatagatgggattgggtcaaagtttctttctttctctctctttcttttctttctttctttctttctctctcttttctttctttctttcttttctttctttctttctttctttcttttctttctttctttctctctctttctttctctctctttctttctttctttttttgtggagggtcaaagtattttcaatagcatgaaaattgaagttttctttttcctttttttatttttgatagagtgttgctctgtcgcctaggctggagtgcagtggtggggtcatagctcactgcagcctcaacctcctgggcttaagtgatcctcccacctcatccttctgagttactgtgactacaggtgtgcatcaccacacctggctaattttttatttttatttttgtggtgacgcgagtgtgggggggtcttcccatgttgcccaggctggtctcaagctcttagctcttgggctcaagctatcctttcaccttggcctcccaaagtgctgggattataagtgtgagccacctcgcctggtcagaaatggaagttttctagtcctatttattgtctgttatttttcttatagctctcacaacatcatagctatcttattattattaatatattattttaaaacctttatttttcagcatgactctggggtcaaaatgggatgcctagacctctaagattcagcccactggtgatcttattcctgtgatattgggttagctacgtaaatcctggaaaatgctattaaaaataagcttttcctttatctgagaagcaggagtaaaaacagtttaaattgccaaagtggtcagtttctagattgtaatatagatcaattgctccagttacaaacacacaattgcaaagtacccacatgttttgctccttgggttagctttcttaagaagcttaaaagtgagtcactgttagtaaaagttgtcgaggtagttaaattaagtctgaaaagtgatcacgcactacactgtgcttacagatggtataaaaagcaaaatatggcagaaatatttgtattgccttaagcttaaggcatctggagtccgaggtttaaccaatgtgattcatcaataaatattgattagatgtctatgatgtatgggatatgatgagaaatacatgtttgagccacagtatctgccctcaaagcacttatcatctaatgactatggctcataccttatttctcatcatatctttcacaaaactaatctgtagaaattgtatcagttttggtcacacttaatgccctagtgatgttcttcctatatttttgactatcagaggcttcaggtgtgattggctggaataatgggctgaaatccatgaggaaaccagtcactgccaactgggagaatcacacattagtagggccttgggtgatgctgattttttttatcactgggagacttttcagcacaggagggtcaggaatgtgtaggagggttaggacctctctgttttgtgaaagatatctctttgtggttgtgttttttttgtttttgtttttgttttgagacgcgttaggacctctctgttttgtgaaagatatctctttgtggttgtgttttttttgtttttgtttttgttttgagacggagtctcgctctgtctcccaggctggagtgcagtggcgctatctcggctcactgcaagctccgcctcctgggttcatgccattcttctgcctcagcctcccgagtagctgggattacaggtgaccgccaccacgcctggctaaattttttgtaattttagtagagatggggtttcactgtgttagccaggatggtctcgatctcctgaccttgtgatccacccacctcggcctcccaaagtgctgggattacaggcatgagccacagcacccagccatggttgtgttctttgttgcctgttagtggtcatttaaagtttcataatataaatattttctgtgcctccctctatgtaggaggctagaagtttctgctttagtctcttaacaaagctctgtttttgtatcctttcactgagaattgctttgactctatgactaggatttggccttttacagaaccctcgttaacttgatctgtgaatttttttcaaataccaatttttcagatgcctggtgccataataaagggatcttgattttgttttcaacctaaataattattctccatgctgttgttttatcgaccaaggtatgtgtttcaaatttgcccaagtgctgagctctcctcagggtacccagtgatgcttcagcatagggttgggcaaacagtagaaccagtgggcactcgggaggcggaggttgcagtgagccgagatcacgccactgcactccaacctcagcaacagagtaggactccgtctcaaaaataaataaataaataaaataaaaaaaaagaaccatggttgggcttggggacatggaaggaatttatgctgccattattagcatttgtagtagcttgtctgtgatttttgcatgtaaatataagaggacagcttttactgagcctcttaattagctcttgtggaatagtagagaaaagagctgtttctgtctcatacaggcagaacgactggatctacaggcttttctcttctaggttatgtctgtcaagtgcagttgctatctaacagtcagtttttaattttgtttttggaggtgagatatttttaaaaggtgtctttcatttattttaaattcgaacctttgtttaaacgtttttaaagttggtgtcattatactactgttcacgaatgaatcattactactctaaaaaatatatgtgactataaattgaccagaaggatccctcctctctgctccctccctgcttcctgggcaactactgcctttttttttttttggacagagtttttgctccattgtcctggctggagtgcggtggcatgatctcaactcactgcaacctccacctcctgggttcaagcaactttcctgcctcagcctcccaagtagctgggattacaggtgcctgccaccacgcccggctaatttttgtatttttagtagagatgaggtttcactatgttggccaggctggtctcgaactcttgacctcaagtgatccacccgcctcggcctcccaaagtgctaggattacacgtgagccactgcgcccggctggcaacgactgctcttatacctcctcatttctgcttcatcacttctcacttgggtctggtttccactcctgctactccactgaaactgctcttatcaaggtcacctatggcctccttgttgccaaacccaatggatacttctaatgcctgccttactcgactttactatagcatttgatagtttttatcacttccttctcctcaaaaatgaattttttccctttcttcctgactttgccaccactggttcctttttttttctactcctgtgggttttccttctcagactccttcatcagctccttctcctctagcagccccttaatgttggctgttaatagatcaaaccccagatctatatcatagtcttcttcccattttacttgctcccctggcgatctcatctacatctgacttcaaccatcttatgactgcacagtgtatatctccagttgagacccctcgctttagctccagataccacatactcaactatgcgtgtgtcacaagtacatccaactcaacgtgtccaaaactgaatgtagccttttcccctgtaaatctgttcatctgtgtatgttccttacctcattgaatgtccttgttatccccctcggtgctcaggccaacttacccacctggttaccaaatcaattaaggttcctcttagtctttcatctcccttcctcagtcactaaatcttcctaaaatataataccttcaaaaaatccttctcgcctcctgtcagtactctcttaggttaggacctaaactcttattgcctgaatgcctacagtagccctgtatctagccttttagaccctctttagtctagaccagtctttctaaagtagaaatctgctatcaagcctctgccttctatgacttcattttacttttgggataaacttcaaattcccttccccaacagataagatcttttatgattcaactcctgccaatctttcaaacctcaactcttgtcactttataagccagccatactaaactacttgattcactggatgggctgtgttgtctccatccttgactgatatgtactactattcccctacgtggaatatacccatttcttctagtttgttacctgcccaggtgacatctctggaaagacttccctaatgtcttactcccccagggttgcatagttgtctcttttctgtttttataataccttgtatacatatatatatatagcattatgattgtttattcagtctgttttcaccaactggaccgagttttccttgacattatgattgtttattcagtctgttttcaccaactggaccgagttttccttgaaggagggaccttgttttcatctctgaaccctggaggcctacctagcatagtacactcattcacgtattaaaagaatggctggctagtcagaatgaaaggcaataggaaggtaaaatgcagctagtagtggtatactatgcatggagttaaggaaagttccagaagtttgggttttatttgtagttgaggtatgtccatacaatgaaatatcgtttggtcgtaaaagtaaatgaggttctgatgcatgctacaacatagataaaccttgaaaatatgctaagtgaaagaagtcagacacaaaaggccatatattgtaggagttcatttatatgaaatgtctagaaaagacaggtccataaagaaagaaagtagatgagtggttgccaggggctgtggattcgggcatgggggaatggagagtgactgctagtaggtgtggggttctttttggagggaaggaaaatgttctagaattagatagtggtgattgatgttcaactttgtgaatacactaaagaccactgaattgtacagtttttaaaaggataaacttttggtgtttgaattagatatcagtaaagccattactaaacaattatagtcgatcaatatagttttatagggctgggcatggtggctcaggtctgtaatcccagcagtttgggaggccgaggtggatggattacaaggtcaggagttcgaccttggtcaggagcctggccaacatggtgaaaccccatctctactaaaaatacaaaaattagccaggtgtgttggtgtgagcctataatcccagctacttgggaggctgaggcaggataattgattggacccgggaggcggaggttgcagtgagccgagatcatgccactgcactccagcctgggcaacagagcaaaatttcgtctcagaaaaaaaaaaaatttagttttacagtacctagaacattgtgcatatttgaatgtcagtaggatgatccagcaatctgtttgatgtcatagtgccagattcaggacttctattccatgttttgattttgaagcagatttttaaaattaaaatctgatcttttagaagtagaagaactcaatcaacctacaaatattattgacttttcaatttgttaaatgtgcattgtttggccagtcatgtgctttgggaataaacttgcgaagtgcattgtttaagtcttataaattgatgaatggaggtgaaaaacaaatttctttttttttttttttgagacagggtttcactttgttgcccaggctggagtgaagtggcatgatctcggctcactgcaacctctgcctcctgggttaaagcaattctcacacctcagcctcctgagtagctgggattacaggcgcccgccaccacgcccggctgattttttgtatcttagtagagttggggtttcaccaagtttcccaggctggtctcgaacttctgagctctcaggcaatccacccatctcggcctcccaaagtgctaagattacaggcatgagccaccgcgcctggccagaaaacacatttctaacacgattgcactgtcgagttgggacacattggagcatattctgtctacagatgatttgaagatattttctccttttgttaccttcctcattacttatttaaatattgatctagaaatgcagtgatctgtgctgttgtcctagggaatgtttttctctcctgtttcactggattatatgaagattgggctgtttgttgtatgaatttagtaatattttaaaacataactgcatttcatctaaaaatcagttctgagctacagggaactaccgtaagagattttctcttatccatagttatgcgtggggtacaaaagaagtggtctctgtcggcaagaagagcttatgttgttcttttttccaggtcttttggtgggccttgtgcttcggtatggcattcatgttccgagtgatgtaaataatgtgaccctgagctgtgaagtgcagtcaagtccaactaccttactggtaaatgttagtggaaaattttatgagtatatgctgaaaggagagattagttcacatgaactcaataatgttcaagataatgaaatgcttagaaaggtaagttcttaaaggaaatctttgaatcttttttgtgtctaactagcagcaaaatgatccaggagaaaataagtaatggatttttaatgatatttaaaataatgagtctttttcaatggagtaaaacctcaattaacaaatgtaataatgtaaggaaatggatatgtctgtacaactcattttctgattgaggttaagtagtataactctttttgtttctctctggattgtttacagcttgttgtgataaatggagactgggattgagttaagcagaatttataagcgtttctttccatttgcagatggtccttatagttttctttttctttttctttctttattttattttttctgagatggagtctcactctgtcacccaggtagagtgcagtggcatgatcttggctcactgcagcctctgtctcctgggttcaagcaattctcctgcctcagcctcccgtgtagctgggattacaggcatccaccaccacacccggctgatttttgtattttttagtagagacggggttctaccatgttggccaggctggtctccaactcctgacctcaagtgaatcccccgcctcggcctcccaaagtgctgggattacaggcatgagccactgcgcccagccggtccttatagttttatagtacttcagcacattggctttatttgataatacctaaaatattctattaatatttctttcaattctttcttgccttgcttgtattctataccgatcacaatttaatctttctttgattcacaatctgacacaacttcaggggccctaagtgtgagtctgagttattgtaccatattgtgcataaagctttatgttagagtttgagttgcaattgtactggctcccagaaatccctggagctgctttctcctgtctccctcataggtttatcatgacgtttctcatgataaacggctcaatgccactttgctcatgtctctttgttttctcctacctttgctgtttgccttcacttctgtctgctacattggcaggacttgacttttttttttttttttttttttttttgacacagggttttactctgtcacccaggctggagtgtagtggcacgatctcagctctctgcaacccccgcctcccaggctcaggtgactctccaacctcagcctccttagtagctcagactacaggcacgtgccaccatacccggctaatttttgtatttttagtagagttggggtttcaccatgttgtctaggcttgtctcaaactcctggactcaggcgaaccacccacctcagcctcccagagtgctaggagtacaggcaggacttgatttttatagctacttggttgtgtttctgaccatctttaatgcttttaaaatttcatatgaacttgaggtttaccttgcagcaggagttctttccacctgtggaaaattccaattccttaaaagttctagttaacgaagttttagcatgggtttgtgtgtagctactttgtgttcatgtcacattctactgcagccttatgaacagaagggggtatttacatttttatggtgactaggtcttaaaatgagtgggctatcggaagtagaaatctgagctgtacagaaactttttactacaatattatacaactttagagatgttatctatgtaagaaatctgtttctttttgccaacaataatactgtactcttaagttttatattaccagtttggggtttcattcattcatttattttttgttgttgttgtttttgtttttttttgtttgtttgtttgtttgtttgagacagagtctcgctctgtcgcccaggctggagtgcagtggcgtgatctcggctcattgcaagctctgcctcctgggttcacgccgttctcctgcctcagcctcccgagtagctgggactacaggcgcccgccaccacgcccggctaattttttgtatttttaatagagacggggtttcaccgtgttagccaggatggtctcgatctcctgactttgtgatccgcccgccttggcctcccaaagtgctgggattacaggcttgagccaccacgcctggcctcattcatttatttttgggatggagttttgctcttgttgcccaagctggagtgcagtggcacaatctcggctcctccgcctcccaggttcaagtaattctcctgtctcagcctcccaagtagcggggattacaggcatgcaccaccatacctggctaattttgtatttttaaaagagatggggttttgccatgtcggtcaggcaggtctcaaactcctgacctcaagtgatccacctgcctcggcctcccaaagtgctgggattacaggcgtgggccacagcacccagccaggcttcttttatttaaagcgaaagtaatgttcatgctttctctttttttttttttttttttttttttttgagacaaagtctcactctttcgcccaggctggagtgcactggcgcgatcttggctcactgcaatctctgcctcccgagttcaagcgactctcctgcctcagcctcctgagtagctgggattacaggcacacgccaccacacccggctaatttttgtatttttagtagagttggggcttcaccatgttggctaggctggccttgaactcttggcttcaggtgatccgcccatccgcccacctccgcctcccaaagtgctgggattacaggtgtgagccactgcgcctggccctatttttaacttttttcttggtttgtttagatggagtcttgctctgtcacccaggctggagtgcagtggtgcagtctcagctcactgcagcctctgcctcccaggttcaagcaattctcctgcctcagcctcctgaaacattttttaatgacatagtattttaatacactttccacagataggccttaactgattgttccaatgctatctcctggtcgtttggttgagaagtagaatagaaactatcctatatgaaatatttttaagttagcacagtaatgttcttgcctttgactagtttaacatatagtattttttctttttgatcatttgataatggaatatgaggtcttctagggaattgatctaaaataactctttattttaacaggttacttttgatccagaagtatttttcaacatattacttcctcctatcatattttatgcaggttatagcctgaaaagggtaagtccttttgtctttcatatactttgaataatcttaaactcagtgggctttgtaatatttgacacttcagaaatgggctgttctttccagattaccctcctttctcctctccttatcctttttagatgctgaaatttatacctgtacaagaatgctttctcttatttatcctagtgaataatgcatttaatcctagtgaataatgcatttcatattagcatagcatagaaaaccttttctttttcaagtaactggtaagtattctaacagtgtaacttttttttttttgtcagagacatttttttcgaaatcttgggtctatcctagcatacgcttttcttggaacagcaatttcttgtttcgttattgggtaagtattttaagcttaaaatactttgtggccttcaaattataattttaaaataatatatttttgatttatgcagtgttatatattcctgactgggtctaaagacttttgcaatattcacgtaggtaataagttgtttgaattttccttaaggccaaagtattaccatatttcaatgacatgaattaaatttgggattagtcacaaagtactacagtaaacccatcttcttactttatcctaatttttttaacagttgatatttttttctaaagtaggactgtgtttattgaacaggtcaataatgtatggctgtgtaacgctgatgaaggtaacgggacaacttgcaggagatttttactttacagattgcctactgtttggtgccattgtatcagcaactgatccaggtatgttttatatgagtggagtttacatacttgaggtgcattgttttgcagtcaaatacatgtgggtttttctttctttgaggtgtagaattcatgattagatacttccttagtactatactttctaattgtggaggaaaaaacaaaattcatgattccttttggcttcagcacaaatttgttttccttttcctttttttttttttaattacatttgcctattactggtccacaagttgacgctgtttcaacaaggactataaggtactttcttcagaaattcatgttggtctttatccctagtgattgagtatagaagatgaactagattatagattagtttaaatgggtaataattatatatttcctttcaagcttttagaaaaccagttccctaaaaatctttcagtttctattcagctgtatgcatttaacagtaagaaaaaatgtttacaaatgattgttagaaggcagttgtgctaatacaggtttgatttggagtcattggaggactttaatatacattaaagaattgtttttataaaattggctttatgattatacagttgtttgtttaatattaacacaacttgttcccctgtgctttaagtgtcagatcttctaaaagttgtgttccagaatgaatttaattgtactgagttaggttttagttttcctgatagagtattggtaaacttaacagctacattcaaattaggaatttggagaagacacagaatggaaaggttggggtaggaacatagactgatgtttttgaactaaggatggaaattttcttttagcatgctttaagactttcgttgaagctcattttgttttactttttaaccttgtaagttaatcatctttaattgtcatccagcacaattaaaggtagaatcctaaggttatctctgcattcctgtgttaactctgataacacagggctttatgggaaggagaaaaatgtgttcaatactctatgagagatattttggctggacacagtggctcatgcatataaatgccagtgctttgggaggccgagatggtaggatcacttgagactgtgagttcgagaccagcctaggcaacacagtgacaccctgtctctacaaaaaaaaagaaaaaaaatagctgagcatgggagtgcgtgcctgtagtcctagctacttgggaggctgaggtgggaggaccacttgagcctaggagtttgaggctgcagtgagctgcagtgaggctgcagtctcattctgcctgggcgagaagggcgagaccctgtctccaaaaaaaaaaaaaaaaaaaaaaaaaaagattttaaaggattagttagagggccattttagagaatttgtgtagtttagcatttttaaaactggaaattaaattgcttccttaaagaccaccaaagctgtcctctcattgtttgtagctactcccattatcaacatgaaggtaggatggttttggcaaggagccggtggtctctggtttctgtgtcctttcattataagcaaggttctcaacttttcaaatcctatgagaaatctgagtccatgagtccattggcttggctacattatttcaactttctggttttgtttgataggactattgcctgaatagcccaagcaaatatcttttgcttatataaagttggactgttatttttttctgaattatgtaagtacttgccccatttctattattttaccattgttagcttgctcttagaagggtgaggtatgggtttcttttagaaattctgcactattgctctactctccttctccccctctcttgatgagctttggtatcagtatattccagctgcaatgctttgtagtagaaactatatcttttaaaatatactggacatggtggctcatgtctttaatcccagtgactcaggaggctgaggcaggaggatcacttgaacctaggggtttgaggctgcagtgaactgtgattgtgccactgtactccagcctgagtgacaaagcaagaccctgtctcttaaaaaaaattaaataaataaaatgcaagtttcttgtttttatgattggcatttgaaaaggctctctcagctgggtctggtggctcacgcttgtaatcccagccctttgggaggctgagacaggtggatcatgaggtcaggagattgagaccatcctgactaacacggtaaaactctgtctctactaaaaatacaaaaaaaattagccaggtgttctggcgggcgcctgtagtcccagctactcgggaggctgaagcaggagaatggcgtgaacccgggaggcggggcttgcagtgagccgagattgcgccactgcactccagtctgggcgacagagcaagactccatctcaaaaaaaaaaaaaaaaaaaaaaccaaaaggctcacctctcgttatattaatttttcatgtccgcttgggtttctttagtaactgagctatgtgacttagtaattaaagttataatataacttcaatttcatctgattttctaagatttctcatataattgctttcctaaaaggaggatttattgtttttcttcttaagctggaatattctcatagttggcttcttattaagacaaatccagcagctgtaattctggtcataaattttaccccaaccaaaaactaaacctatgttttcatttcctactgtctttgctaaacctttgtgcttgcaatttgtaagtcaagtacaaatgagttgtaaggcccaaagaaacaaagtttgcaacattagattcttttcataatattcttcttcattaaagattaatgactacatggtctataagaaattctgaatatattctttgtgggaaagaaatgtacaagacacgattattaacatctgcgtgaagaatgtaggccaactcagttcttcagggttactttcagccatttttaagagagagaggagaagtttgtgcaggtacacaattagaaaagaaaaatatttatataaaattacggggtctttaatatggtaagagaatgtttattaggattgaattctaggaggaaatgaatttctaaataactctcagagtcatctactgaggagaatatgttatatttgtaatgtctaagtattcctctgactctttttacttactagtgactgttcttgctatattccacgagcttcaagttgatgttgaactctatgcacttctttttggtgaaagtgtcctcaatgatgctgttgccatagtgctgtcctcgtaagtgtttgttttcttattatattctgaatattaagtgtgagggtactaggaactgaaagtcacttattgaataaagtacattatgaatggaaacatttggaagaatgaggcatttttttccctcttgaagaaatccatattttatagataaattggaaaatacagggaagagaaaaatatgtactgccaccacctaaagacaattactgtaaacattctagaacatttccttttctatgtatgatattgttacatagttgtgattgtagtgtctgtataattttgtattcggttttaacattacaacatgagcatttaattttttaaattagatttaatattttctttcttttttttttttggagataagagtctcactctatcacacaggctggagtgcagtggcgtgatctcggctcagtgcaacctctgcctcccaggttcaagtgattctcctgcctcagcctcccgagtagctgggattataggcacccgccaccatgcccggctaatttttgtattttagtagagatgggttttcaccatgttgcccaggctggtcttctcctgacctcaggtgatccacctacctcgatttcccaaagtgctgggattacaggcgtgagccactgtgcccggccttaattttttctgaatacataatatattcacgtggctcataaattaaagtcatgtaaaaagttacacacagaaaattcacactcttacatctgtcctcatccacctgtccccctagttccttgtagataactttttttttttttttttgagacgaagtctcgctcctgtcccccaggctggagtgcaatggcacggtcttggctcactgcaacctctgcttcctgggttcaagtgattcttctgcctcagcctcctgagtagctgggattacaggctcctaccaccacgcccggctaatttttgtatttttagtagagacggggtttcaccatgttggccaggttggtctcaaactcccgacctcaggtgatctgcccgcctcggcctcccaaagtgctgagattacaggcgtgagccaccacgcccggcctagataaccatttttattagtctcttacctatcttagtatttctttattcaaatgcaggcacaaccgtgaataaatagtcttatttgcctctcatttcttatttttaaagttacatactgtctatcttctggagaactttgcatgtcaaaagagtgaatattctcattctttgcagctatatagtattctctgtgtgaactgcattattgtttatttgctcagtctcctatagcaggacatttgaagggtttttaatcctttgctgtcccaaaaggtgctgcagtgattaaccttgaacttaccttgttttatacatgtttaggtataatggtaggctgaatgtcccaaagtgagattggtaggtaggttaaagggtaaaatccatttgtaattttgttcgacattgttaaattgctcatcaaagaaattgtagcacttcgcactttcaccattaaattattggtctgtttcctcacagtttcgccagcagaatatttgtcaaacttttatatttttgctaacttgataattgagaaatatctcattgtagcttaatttgtgtttctcttatttgacataatcatttcaaaacatttttaatctctagaagtgttaatatatattatagatatgtagttatgtattacttataccaatttaattgcagacaattttgaatgagcaatattttttatctaattatagaaagtactatacatgttactataaggtgtttgcaggttgaagaatgagtctgaacctctgaggaattcaatcctgcctccctaatcttttttttttttttttttttttttttgagacagagctttgctctgtcacccaggctggggtgcagtggcgcaatatagactcactgcaacctccacctcccaggttcaagcaattctcctgcctcagcctcccgagtagctgggactacgggcatgtgccaccatgcctggctcatttttgtatatttagtaaagacggggtttcactgtgttggccaggctggtttcgaactcctgaccttaggtgatccacctgcctcggcctccccaagtgctagaattacaggcgtgagccaccatgcctggcccctgcctacctactcttattaggcaaatatctaactctataggcagttgcccttacttcataccagaactttctatgagagagaagtaagagcccttcacattttctctttatttttatttctctccttaattttcactttgttagttatgaaagaataaaacatcactggctctgttttgcatagcctgattgtcttctgcaaagttggaaattattatttctcagatgtaacattaatcccttaaacgttgtatgtgaagatatacaaaaggccatatccttttttgtgaatgcaatgtatgtaaatattaccccctccccaccatatttattgccagattttttttgcagctgtctgcaactaatataaatttaacttgagaaataaaacctaaaggctgtaactcatattgatactgaactttagcaccttcaatgatgataggtgcagaataagagttttgtattatttgaagtaagggagaaatggatagtatggttataaaaaatgttataaaaaatgaagcaacaaagattgttgaagcttccagtacgtaggtacatgagcgattaccagcactacaaagtaaagagagtaggtacaggcagtcacttttagcatcgattccctatcctagacaactattctactgttcagtcatcttactagtaactgttgtcttatcattgccctaatggcctaatggattaagagttagaaaatctctgttctggtcttatcttaaactgatgtgccctgtgccttagtttttcctattaataaaattgcctgtttcctgcatctttaggaacagttgattagcgttagaggaaaagataaaaaccctcattgaaagattttgagcttggagttataaataatctatttcctgcaacattaggaatagttgattagtgtgaaaggggtcaaaacctcattgaaagattttaagcttgggggtgtacataccagtgttggtgaagaataaatgctaaaaagagagagccggctgggcgcagtggctcatgcctgtgatcccagcacttcgggaggccgaggcgggcggatcacctgaggtcaggagttcgagaccagcctggccaacatggcaaaaccctgtctctactaaaaatacaaaaattagtcaggcgtggtggcacacgcctgtaatcccagctacctgggaggctgaggcaggagaatttcttgaacccaggaggcggaagttgcggtgacctgagatctcggcactgccctccagcctgagcaacggagcgagactgtctcaaaaaaaaaaaaaaaagagagagagccctttccatagcatttctcacaaagggccatacttcttctcttgcagcctttctcaaacagggttttctgtgagagaatgaagccttataggaaacaatttgagtgagtcttttctcatttcacctaaggatgatagcgagctagtgccattttaaatttgtaagagataatacgttaactcattacaacctcagtgggattctggtggagaaggactgtatcttgagaggaacataacagagaaattgttagctctgtgttttaatagaattgaaaaaatgagttactgcccaaaagctgaagggaaagcagttgtgtgctcgctgtgggagtttactagctggaatgatcagtggtatcatgctcatcattcttcatttaccttttatgtgttttgaagtgggttagatgcagatagtctactttgtgttgaattttcttagtttgaggattatctactgtctgcattctgtgtaagcagctttgcatcaaaggggagggaacccctttttgaaggagttctgtttggcagttaacaggttaaggcaactcatcttgaaatttatgttggaggttgtttttgtttctgtctggtttttttttttcccaacttttattttaagttcaagggtacatgtgcaggatgtgcaggtttgttacataggtaaatatgtgccatggtggtttactgcacaggtcaacccatcacctagatattaagcacagcatccattagctattcttcctgaagcactgtttttttttttttttttttaacctattggagtagcagttattttattttattttattttattttttaaaataatgcttttaatccagtgagggtgaagtgaaattgactccctcatacatggctgcatgaggtagatctatatgtatattgatatattatgttagatacggtatatgtagttagagataaagtatacgttgcatagtattccactgaatggattaccgtgattagcctggggacctaaatccatattagtttaaaatatgttgtttacagtcatttatatttttatgaaagaagatgtacagagagacaacaaacgtgataaactgtttaacttcactaattaccagagatacatgctaggatcagtagccatttctacctattcaattaacaagacataacttttttttttgagacagagttttgctctcgtcacccaggctggagtacaatggcgcggtcttggctcactgctacctccgcctcccaggttcaagcgattctcctgccttagcctcccgagtagctgggattacaggtgcacaccaccatgcccagctaatttttgtatttttagtagaggtggggtttcaccgtgttggccaggctggtctcgaactcccaacctcaggtgatccgtccgcctcggcctcccaaagtgctgggatgataggcaggagccactgtgctcggccagaattgttaatgataatgacatagtacagtcattcttagccaggggcaatttgccaccccctcaccacacacacacaggagatatttgacagtgtctgggggcattttggctgtcatcaatgggggggggttcctattgacatggcctagtgggtagaagttttcaatgcacaggacagcattcccctcaccccacccccatcacagccaacaaataaatacctggccacaaatatcaataatgctgtggttgagaaaccctggtgttgtaaaactagaccactcatacattgttaacattgaaattggtattaccttttatcactatttatgataatgttaaaatatgtttgtggcaaaaatttaaagcatttgactcaaaaagtagaaaattcctgaaatttcagctcagaaataaccactattaggattttaatccagactttttccgttaagatagtagtatacatataaatatgttaataatctttataaacaataaaggcatagtagtatatatacttttctgtagcttttttacttggatattatactatattaatacctctattatcacattgggtggatgcattacaaatttacctctccaatcccctattgattgattaatatttggtattttctaatattgtattatgactagcatggcagtgagcatatttatgtgtaaatctttgtgaatccttgtaaatatttctgtagggtattttttaggagtagaattgctaggtcaatggtatgatcattaaaaaaattgggagatattatcatatttccctccaaaagtgtaatggagaccttttggaaggcagtggagcaacatgtaaaatgagccataggtatagtaatagtctatttttagaaatatagtgcaaggaatagtctaaaatatataaaaagcaagaagatgttctttcagttatttatagtagcaaaaatagtagaagcaactttcaaatgtctaacaatgaggaaatggttgaataaattgtgctgtatccatttggaccattgtgaagtcttaaaaactgtagttataaagactatgaatttttttttttcttgagatggaattttgttcttactgcccaggctggagtgcaatggcatgatgtcagctcactgcaacctccacctcccgggttcatgaggttcacctgccttagcctcccaagtagctgggattacaggcatgcaccaccatgcccggctaattttgtatttttatttttagtagagacggagtttctccatgttggtcaggctggtctcgaactccccatctcaggtgatccgcctgcctcggcctcccaaagtgctgggattacaggcatgagccactgcgtccggccaagactatgaatatttttatgtcattgtcagttaaaaaagcataattcaaaaccacacattcactgtgattacagctaaataagaattagcatgcatgtaacacaaagaggggaaaggaatacagaaggaaaataaaatcgatctatcagggtagtggaatgatgggaagatttttccacctaaactgtacattttattactttcagggtttaaaaaaaagtattcataaaaaatgctactgcctcaagataaaatatcaattgatacagaaaagatgagttaagatttcaatccagaggctagtgtctgcctaagagagaacaaaacgagcctgtcatctgttctcagcccatcatgtttcccatgtgtccttatacattttaatgattaaagaatgaaataatgattagtgtgaatcttgaatttacatgaactaatccagggaaagcaacctcaggaggcatggcataggtattttgttccagagagcattttgaaaaataccaccaaagaaaaagaagattgtatagcaatttttttcttttctccagccagttactgtattttcatgttataatgaaatcagatctcatttatggtagtgggaccctttatatatatgtaggtaaggtagcatggtgttaaaggccatttcatatttatcaaaatgatatcaaatctactgttccaaaatgatctggttgctttgcacatttaaacgtaaatgtttaacattttcaatttagagtgagtctcagaaatttctggatcccattatcagaaattaatattagtgctatatttcaataaaataagtacaaattaggagattttagtttgatcttagattttttttttaacctgggagatatgaaaagaacttgtatatggtatagcaaacatttttcagccttgaatcagaaaaaaacattgcagcaaccacagggagaattcattatatttttaggaatgtgtttttccttcttttctttgacgtgatttgtatgatgttgttgagtctggactttttataatgctggtctctcaattaactgagatgagaactgatttagtaacggtaagcaccgttgccaaagacctgctggcaacagcaattttctcaggcatttctatttcctggggtggtaactgttacaaaagaagctttttcagaccaggtttggactgtgagttcaagatggagagcatctcctataattgcctgtcttggcctggtatagagtgactttctttcagaagtttgaggtggaagatccagctggttatgctgaaagtactgttgagtggattctaattccttgggaggtctttcgagtgctttttcctataatagtccatttcagtgaatgaatagatattaggcatttggcccattctagaattctaaaagttggaagggtccttcagttacctttttttctcataggaaaaacaaaatgtgactgggttgagtattgaataatgttctttatgttcttatgcctctactggaaacaagtgggatttttcattagtttgttcacattagtatgttaaggctttcggacactcagtactagtaattctgaaacagaatcacaaaagaataatactgcacagtatcttggggatgggggaaaaagcttggtgcaattttcatatagaggattttacaatgttctaccccccccccgaaattaacatttaagggaaagccaagttttcttgctagccagatacattgcaggatttttgggtaattttgtccttattttggcaattccaatcgaaagcttgtttttcttctccctctaatttcatctttcaagctctatactacataatgtttttttaaaagtaaaggttgttttcagaagtaaaagcagtctctcttctgtagctcaatagtggcataccagccagctggagacaacagtcacacctttgatgtcacagcgatgttcaagtctattgggatcttccttggaatcttcagtggatcttttgcaatgggtgctgctactggagtggtgacagctttaatatccttttgttatatttatcttttcttgttaacataatatagtagttgaatgctgtattccgttgtttttcctagttctatgattagaattatgttagaattattaatcttataactaagtacttggtttgaaaacattaagcaacagtctttgccaataaataaataaaagaactgtattgttctgcatagggtttggtgccctaaaactttcactgcaagtgtataattagagatgatatctctctgagggtgaattttatagttgtagattaaatagctgtaaaggtagacatattccaaagagcctctgggtgttctgtgttgctggtcagcctggcagtcttttgctctttgtttaataggacaaataggaaatgtacaacagcgacgccgaatgaacaaaatgtgtttccttggttaggatatgtaagagttcatctcagctctcccgattttaaactttgtgctctagagccctggacgggaagcccaaaggacctgagttgtagtcctggtactaccacttagtcaagttattcttgtgttcatgcaaaggccattttatcccggacttcaccaccatgcaatatatccatgtcataaaactgcacttgtgcatcctgaatctataaaaacaaattttatttttatttatttatttgtttttttgagacggagtctcactctttcgcccaggctggagtgcaatggcacgatctcggctcactgcaacctccgcctcccgagttcaagcgattcccccgcctcagcctcccaagtagctgggattacaggtgcgcaacaccacacccagcaagtttttttatatttttagtagagatggggtttcatcatgtcggccaggctgatctcgaactcctgacgtcaagtgatccacccacctcggcctcccaaagtgctgggattacaggcatgagccaccgtgcccggcctaaaaacatgttttaaaccccccacccaaaacaaaaagccagaaggcatgtctggatcacctgctacatgtgctgtgctctgtgtatcaaagctaaagaagacaaacatgacctctgcctccctggtgctttcgatatagtggcagacacaaacatgctagaagctttgacacttcacctctttggatctcagtgtaggaaattggagggtggggacggtaggaaagaggagtgggactagatgatgtctaaagagtttccagctctggcctggtgcagtggctcgtgcctgtaatcctagcactttgggaggccatggcgggcggatcacaaggtcgggagatcgagaccatcctggccaacacggtgaaaccccgtctctactaaaaattcaaaaaattagccgggcatggtggtgggcgcctgtagtcccagctactcgggaggctgaagcgggagaatggcatgaacccaggaggcggagcttgcagtgagccgagatggtgccactgcactccagcctgggcgacagtgcgagactccgtctcaaaaaaacaaaacaaaacaaaaaagtttccagctctaaaacttctatgatacttgtataaaacagatacgttattctttgtcaaggacttcttagtttggtatacttcagccttgtgctggaagaggcttcttttatggctttttataagtgaactgaggcataaagcagcagtaaaaagagttctgaaggtgatgccaagagtgatagtatctcttccccattacaagttccttgagggtagaaagtatatcttgttaatcattttgttgtagtgcctagttgtagaaatgactctagattctagcctgagattggtcgtaacttggcacaggcccttccactgtcagctaacaaatacttgttaaactagtataaagcagtgaagtgcctcaatttcttcatcatggaatgaatgctctatatcatagaagtggtagaggatcaaattcgtgtaaaatctcttggaaattatgtatttttataaatgtaaattgctacaattatggaagctgtctagctttgggtctcagattaatagaggtggcatgttatagatctgatctgttactcccgtctctatctatcctttactgcatggtttctggcaaggtgtgtgatacccgtgaaacaattggagtggctaagccgtaaggcttcctcactgaagggaaggcagctgactcctcagtaagatgctcattttaaaagtctccctattctggtggtaccttattctgagatttctgtgttagagaagctagagaacctttctttcatggttgccttgcttaaactgttattttttctagtcacacttttgtgttacaagatctcattactagccttaacagtcttacgtgacaaagttcaccaaattacgggagttccagttgttggagacaggcctgttcttcttgatgtcctggagtaccttcctcttggctgaagcatggggcttcacaggtaggtgacttgctccctttgattgtcaacccttaaaaggagtgactttgccagtcaattttgctccaagtggatcagctccgttagtatttgaacatacttattgtggttgggatttaggttgttgctttagaacataaaaaaaaattttcagtggaagtggttcctcttaacaaagtaagtcacaaatgagaatttccagacaaagcctataatctactgtgaagaaagaacctcagtataaaaggtgggaaccatccttttatgtgaacttggaatttgttgtctttataggtgtagttgcagtattgttttgtggcatcacacaagcacattatacgtataataatttgtccacggagtctcagcatagaactaaacaggtaagaggaactttatagtttgtgaataggcttttccttctttcagcaaaatagaagtcttttttactaaaaaaaaaaaatagtctttgatctgttcaagatgctatctactcattttggctcctcttcctttgactctaaaagtaggtgggattggcaaaatgaagaatgacagcatttagggtggaaatagatcagcagaatagccagagactgttactattgtggcttcaataaccagtgaagtagcttccctttttctcagtgttttcccaatttaatggcttttaaggggaatgttttggaagctcactctggttttacttgaactactgctgtgtgacgtagataaggttaacttctgatctgaccagacctactaagagatgacataaagaaaattaacttctgatattactagaccttctaagacatgacataggtaagattagcttctgatctgattagacctactaagagaagataaacttccttcagtccgctcaggtgctgcaaagctactatgtttccaggaatgtcaggggactagtcagtggtctggttttatttggtactgaatgatcagttgtgcagggtatctgaagggaattataaaggagataggaatacaatttttccagtcttaggaggtatgtgggacaaatacatgaaaaaagtgtaatgtctggaatagaaataggtgcatacttgattatggctatagtgagaaacagaaggtttaaattttgccaaatgacaagaaggttgtgggattcgcctgaaaaggagtggtgctaaaagcaggagcaacagtatttcttcttccggctagagccacaaatcaagtttatgacctatgcttttccccagcccctcaaaagagattaggctttttcccccaagtgtatacattagggctacaaatcctttttacaaattaattcagtgcaataagtaaagagaagaaaatcagctggcagggggcggtgggggaggggagtcagcatttttccaggtcgtgggaagggaataaaaaacaagaacaggccgggcgctgtggctcacgcctgtaatcccagcattttgggaggccaaagcgggcggatcacccgaggtcagaagttcgagaccagcctggccaacatggtgaaaccccgtctctactaaaaatacaaaaattagccggatgtagtggcttgcgcctgtagtcccagctactcaggaggctgaggtagaagaatcgcttgaacccggaaggcggaggttgcagtgagctgagatcgtgccactgcactccagcctggatgacagagcgagactctgtctcaagaacaaacaaacaaacaacaaaaaactagaacagggtaagagcttccagtgttgttggtgatatgatatgaagcttatgtacatttaagaaatatgaggaataggaatcctagattatgtacttcagattatatgtcatagaagacatcagagaagtaggggaaatggtttgaggcttgaggatctggaaagtatcctagaagaaacagtacccttagaaggatggggaagatttaggaaggcctaggggaggcagtacagataaaggcaggaataaaaagaaggcagtaaagtgtagagcagagggtggcggactccagccctccggccacatccggcccttgccagtgagctaagcatggttttctttccatccatttttaattggttggcaaaagatcaaaagaagaatatgttgtgacccatgacagttatatgaaattcacatttccatgtccaccaataaaattttcttggcacacagccacacccattttttaaaatatatagtctatggctgcttttgtgcttcactggcagagtgaagtagttgtgacagagacttcttggcctgcaaatcctctcatgtttactctctggccattcatgggaaagtttgccgatccctatgttgcaaagtaaagctgggactctggagtcactgtattgttttaaatcctggttctactacttgctggctgtgtgaccaggaggaagttccataacttctctgtgcttcagttttgccatctttgaaaatggagataataataatacctacctcactgagtttttgtgggattaaaacgagataatgcatatgaagtccttagtatagtatcagacacacggtaaaaactgaaaaaggtatagctgttatcattagtataaataagtagtaataatagcatattaaatcatttaaagaaaaataaatatacgcttacttattttaatttttattctcatttttgggtaataaggcaaccctggtttaaagagattaactaatttgcccaaagccacacagccagcaaaggggaagacagggctcaagcctaagcattttcattcttaagcccatgttcttaaccactattctgttatgtgtcagagggctcattgtagataactctggtggccagagggacacgagattatgaagggccttaacttcattcagcaagtatcatataccattgccaaggctatgatgtgaatgggatggggcaggcgggcagcagggtttagttccccccacagatagttctgctatcctacagatcgatctcttccacaatgtggaagcccctatctgtaggacgcttactccctatacgagaggaagacccacgcaaaaagtgaagtcacagggcaagctgggagtacgagagttctcacgaagcactctatgctaggatcagaaagttgaaatgaatcttatagcttgcaagaggaaagtatcttgaaactatcagttttagagattcattggtttgggggagctggaggatgagggatggttagaggtcctttctcatcattatgggtaggaagtgatgaaagtttgactaaggcagtagcagggacacaggaacattaaaaaaaactgacagtttggaggaagaggagaggaataattgaagatggggctttgaagaagggaagctgttaggggaaatgagggggcaacattcctggctttttctgcaggactagaaatgtcgtctccacatttgctcccttctgaaccacatattttgtgtgtatgcatgaagtttatatatatgagtgtctgttttaatatcttagtaatactcatgctttcaaattatgtaactttatttgctggactaatcttttacaatttcgtttcagttgtttgagcttctcaatttcttggcagagaatttcatcttctcctacatggggctgacactgttcaccttccagaaccatgtctttaacccaacatttgtagtaggagcatttgtatcctttattatgtgttttattttgaaaatatttttaattgagattttcatgtgggttttgagtatgtggttcataagaatacatttaaatatatacagttttcctctgagtaaaacaaataaggattccagctcttttttctagtctatttattttattatattctatttcaatttgtggttattgcacaaataatgttgacagattaaaatgacagacaagtgtcccactgttctgccaaccccaaaagataagtgttttccctttattactacagggaaggagaggttggatactggggagcagttagcagtctatgccacagggcagaaggcgaaagataaggaaacgttgaatgaggccactttctttctctttctctccctcccccaacccctctctctccctctctctttctctcatatatatacaaagagtcttataaaataaaaaccccaacctgggcaatgtagcaagaccccatctttacaaacaaaattttaaaaactagccaggtatggtggttcatgcctgtagtctaagctacttgggagggtaaggtggaaggatcccttgagcctaggagtttgaggctgcagtgagctgtgattgggtcactgcagtccagactgggtgacaaagggagaccctgtctcaaaaaaaaaaaaaccaaaaaaccaaaaaacagttggaaggaagaaactgagtatatgaaagagaggaggcaatagtgaaagcctcttgagaaggcaggaatgaaatccaaagcatgtagagagaaattttgccttcactggaaggagagacaactccaccatgactacaggagaggatagggtatgtagaaatgaaggcacatttgtaagatggagccatcctctctgatggcttctatgtttatctgttaagtaggaggtgagatcatctgctgagagtaagatagggagttatctattgtgtaacaaattaccttaaatttagcagcttaaaacaacagacagttattatctcacacagtttctgagggtcaggaatcctggagcagctcatctgggtgattctggctccaggatctcttaagaggtcgcagttgtgctcttggctgggactgcaccttctcaagacttgactagggccagggaatccactgcaagctcactcaactcacatcactgtcagcaagaggcttctattcttcacgtggatatctccatagggcagcttacaacatggcttcttcccccaaactgagtgagctgagagagccctaaaatgaaagccgaagtgccttttgtaacctaatctttgaagaggcataccagcgtcacttccataatattctgttggttatacagaccaacctggtacagtgtgggtggggactacacaagggtgtgaatactaagaggcagggatggttagggactatcttgggggatggcttacacagatcatagggattttgaggaagatggaggttcgtgaaatagttgttgtagagagtgggagaataagttgaccaaagaaactcaacaggactgctaagaagtactagggatccattgtgtttgagaaataggaattagcagtagaaccaatctgccccattgaatgagtttgtccagcagtacttactgtaagcatggaaaaaagagatagttggctccttccaggtttggagttttttcaagtgggtgcaatgaaaacagaaggacaagagatcatagtgttattacatgactgatgcactctaaacacttcatttaatgtttaacattaaaaggtgttattaacatgatgataagaagggaagtgaggaaagaagacattgtttaaggaaagaatatagggatctttggactgaaggtcccagtgctatggaggaatgatcagagtgggatagttgaacacaaaatatggaaggagcaattgtggtcagtgggaatgtttgaataaggaatttttaaaagaaatattttaaaacctcacatcagaatgaagattctgccaaagagattagtggaagtttttttttttttaattaaaactctagataggatctctgttagaaagcgaagtattactgaaatactattctgcagagccttagtctgtgaatgaactttaggcaaaaaagataaagtactgttaataagagaagttcttagctgaaagataaccatgagatcagtaacttaatgtcctgctagtcttggagaaaatttggagcagtaaagtggctcgatccactatacttagtctggaaacaaagctaaatattctctgtaggtttctgagtctgttaggaattaaaattcctcaatacaaaatcctaccatgaaaatggcctcgtaacaggagagagttgctctatttctggctatgttagttaggacataggttggtttcatgtgaaaagactcaaactaatccaggtttaaacaacatagaaatttctttcttatctaaaaatctgaactggtatggcagttctgctgcatagggtcatcagggactgaagcaatattgttgctaacatccttagggacttgctgttgttcttgtgatccaacgtggctcacccctgtctgcccgttgccttgaagggcttgacccagaatgtgcacacgtcccttccacttaacatcattgattacacctactcacaagggaggctaggagttatatactttatctgggtggctgcataaagatgaaagggaggagtgccaactaccaaggaagaaagcaagaacagatgttggggagaactagcagtcactgccacgttggcccacatgtttcgtggttacattttcttttctttttagggaatcactttttaaaataaatgtttgattttagaatagttttaggtttacagaaaaattgtgaagataatacagaaagttctcatatgccccgcactcagtttcccctattattaacatattagcatggtacatttgtcacagtgaatgaactaatattgatattactaactaacgtttgaactttattctgattcccatagtttttccctaatgtcctttttctattccagggtcccatccaggataccacattacatttagttgtcatgtccccttaggctctgcctgactgtgacagtttctcatatgtgttcattgtttttggtgacccttgacagtgttgaggggtactagccatgtgttttgtagaatgtcctgcagttggaacttgtctgatattttccccatgattagactggagttacatgttctttgggaggaagaccacagaggtaaaatgccattctcatcacattatatgaagggtatatacttaataatgttgacgatagtcttaatcacttggttgagatagtgtttgtcagatttatccattataaagttacacattccccccccttcccccgccatgttgtactgcgtggaaggaagttgctatgagcaaggattgaggaatggggagttaggttccacctccttgaggacagagtatcagcaaaattatttggaatttttcacacaggagatttatctattcttcctcatttattgttttattcagtcattttttaattattattacttttttttttgagacagaatttcactcttgttgcccagactggagtgcaatggcatgatctcagcctactgcaacctccgcctcccgggtccaggcgattttcctgtctcatcctcctgagtagctgagattacaggcatgatctgagattacaggcatgcgccaccacgcccggctaatttttatattttcagtagaggcagggtttcgccatgttggccactctggtcttgaactcctgacctcaagtgatctgcgcctctcagcctcccaaagtgctggaattacaggcgtgagccaccacacccagcccagtcatttatttatatcaatatggattcactgatatttattttatactttgagttataatacaacttttttattttcttgctgaaactgttccagcttggccattgagagctcttttggcaggctctcctgtgtgcctttgatatatcctcatcattgtttttaatttttatcttcatcattgtttttaattttttttttttgagtacttccttactccctggaactataagatgcttcaggctcatcttgtatctgttctggctcagcccaagaattggccatttctccaagaagtcctggttccttttattggagaatagtattagaaaccaaaatctgagcactaggtgtgctcagtgttacttggtgtctttgcttctaggccgtctcagctgacagattgcttctaggctctctcagctgacagagcaaggagttagatatgtatatatctatatatccatatatgtagatatatatactaactcatatatacacatatatctatacatatttctgcatataaccatctgtatctctgttaagctcaatatgggttcatactgatgtctccaactttaattcattaccacatggatgattctggcctcctcctctttctgaactgtaaactcccattctaacagtaagaaaccttgttgtcaccacttgccatccatttacctaattgttcagtttcagtatacatgtataatagtttcagaattgttaaccagtgttcccatgggaaacagctttgtcatgagcatagaatgcttttgtgcagtgtcttctgtctttagtcttacagattcttctgttttccaaagttacttagaccaacaccattccccctaccttgtttgttttgagacagggtctcgctcttgtcacccaggctggagtgcagtggcacgatctcagctcactgcagcctccatctcctgggttcaagcaattctcgtgcctcagccaccagagtagctgggattacaggtgtacaccaccacacccggctcatttttgtatttttaatagagacaggtttttgccatgatggccaggctggtcttgaactcctggcctcaagctatcctcccgccccggtctcccaaaatgctgggattacaagtgtgagccaccatgtctggccttgttctgtttttaatcttagattttcccttatatttttctcaggaaatgggatggagactgtatcgtgactcctgaaataaaaattgccatcataaagcaggagtcccatagacagcaaactggagaaaaagatactaaaattggtttctagttaaaaccaatctgaattcacattaaactttccctttgaagcaagttggaagtataaacttagtggagtacagtgggactggtagccattttagtgctgtgaggtggtgattcagctgcccttttctttgttctgaggaaggaaggggaagttttctcagtattactcttcttcctaccaacactgacaatgaaagtgaattaacctattctattaataatcttaaaagtatagtaaagaaactgcttttaaacgtgtttctcttaatctagtaaatttcctgcatgttacacttgctctgtctgatttggtagcaactagccaaatgtgattattttaatttgaagtaattaaaatgaaataaattttcagttccttgatcactctagccacatttcaggtgctcaccaaattggacagttcagatatagaaaatttccatcattgcagaaagttctgttggacagtgttatgttagacaatggaaccaagagactgtgtgttagaaactgagttccctaaaatagtctttcaccatcttgagtgtatagtctaaataatattaatagtaaaatgaaatgatccttaacctattaataattttaggttgctattttcttgggaagagctgccaatatttaccccttgtccctcttacttaatttgggtagaagaagtaagattggatcaaattttcaacacatgatgatgtttgctggtaagttgtaactttcttctcttgcccacttcaagcaaccattcacaatgcgtgtgccagcttgatgtaacactgagatgttatgctggtcatataatactcctttatttttatattatttatttatttagagacactgtttcactctgtcgcccaggctgtagtgcagtggcacgatcttggctcactgcaacctctgcctcccaggttcaagcaattctcgtgcctcagcctcccaagtagctgggattacaaggcatgcaccaatatgcctggctaatttttgtatttttagtagagatggggtttcgccatgttggccaggctggtcacgaactcctgacctcaagtaatccacccaccttggcctttcaaagtgctaggattataggcatgaggcaccacgcctggcctataatactcctttaaacattgaagttgcatccttgaatagaaaaagaaaatgtatatatatatatatatatatatatatatatatatatatatatatatatatatatatatagtgtcccattcccttctgtgggaatttttcatattctgattccaaatccttggttcagaattatgtcatacaaagtgagaaagataaggatgaagtcattttcaaacaaaaaccagtaggtgaatgtatagcagttcttttcataattgccaaaacctggaaacaacccacttgtctgtctctcagtggtcaaatagctaatcaaactgtgatacatccatgctatggaatactactgtgcactaaaaagaacaaacaatttacccatacagcatggatgaatctcagaggcattatgctaagtgcaagaagccagtcttgaaaggttacctgctgtgtgattccctttatatgacattcacaaaaagacaaagtcgtagcgatggggaatgcatcagtggttgccaggggtttgatggagtgacaagaggttagactaaaaaagggtaatacaaagaaatttgacagggggagggatgatgaaaccattctgtgtcttgattgtagtagtagtcacacacacctctatgaatttgccaatattcatgtggctatagaccaaaaagagtgaattttactgtttgtaaatgaaaagtgaatttaaaaaaattactgaaacatcaatgcatgtcagtaagtaacatacacaaattctatttctgtttgtactttttttttttttccgagatggagtcttgctctgtcactcaggttggagtgcagtggtacaatctcagctcactgtaacctctgcctccctggttcaagcaattctgcctcagcctcccaagtagctgggattacaggcatgcgccatcatggctggctgatttttgtatttttagtagagatggggtttcggcatgttggtcaggctggtctcgaactcctgacctcaggtgatctgcccacctcggcctcccaaagtgctgggattacaggtgtgagccaccatgcacagcctggacatatttaagtatgttaatatttactgcatatttgttcacatgcttctaagtttttagaacgtgctttcttgctctgaatttatgaagcttgcattggtaatgagttattgaagaaataccttttctgttcccctgtaggccttcgtggtgcaatggcatttgccttggccattcgagatactgccacttatgcacggcaaatgatgttcagcaccacgcttctgattgtgttttttaccgtgtgggtatttggtggtggcaccactgcaatgctgtcatgcttgcatatcaggtaagtactaactagagacctcattttaagattaaattttaatttggtttatttttctgcctgttttcaatttttaatctttggagaatctgtaatgttttattttttccttttaaaaagtatgtaatatatagtacagaaaaaggaaaatatatatgcaaaagaaaaattcattgttaagactttgagggatatctttccagatcttttgctatacatgatatatatttttgacaaaaaggggcaacactgaaggtactcttgtagcctgatttttaaatgtaatatagcatggacatttacattgtaaatatatttacatcattgctttaatggctgcatatgtcctgatttacttaatcaaaaccctgttgttggacttttgtattgtttctaggattttgctattaccattaccatttgaggattttgctgttactattaccgttaacgatgtgaacattcttaaatgtatacaccactgtgtacttgtttgattattttttagaatgcatgtctagaaatgaaattgcttgctcaaaaggatatgtatatatttaaggcttttgatcaatatcaccaggtcagataaaaaatttgccttccacctgcaatgtatgagacaatgcggtttactccaaccctaatcactactagatattatcatttttctcatcagcactgtttttaacctaacaatccaaagccgagatcgtgaggtcttagtcttgaatgtgtaccagttaatgtattcaatttgaaagctcccttgtatctcaagagttctgcatttgtttccatggatacagcagcctatgctgctaaagcctttgtagatttgagttctgtgtttggctgaaacttcatagacattaagagctaccaagcttccagaatacataggactcattagagaaaacagtatttcacactttatagatcctgtcctccatttttttaaattctattacaccttttttaagacttctaaaaaccagccagccctaaatcacactttgaatgttgttgttattgtcttaatttctctttactattcaaatctcttataatttctgtgcttttattgtgcatagtataaaatacacaaaaataatgttcttataaccttaattattactttagggaggacctggcatttattgaacacttactatgtgctgggcattgtgctaagtacattttacatatttatccaaacatgataactccattttacaagggatgaaatagaggcttagaaaggttctgagttgttcaaggtcatctggataattaaatggcaggcagaggagcctccagtctttcttaatttttttagaaattaatttcatcaaataatggtcatggtacattttgaaaggacacagttcctttcttttctcaagagcttgtagatgaagactttccctcattgtcctaaggataacaaaattaaatgtaagaacaaaccaaacaaaatatctacgcttaccatccccgcaaaaagaaaagacaaaaacgtacctactcacacaaaatttaatctacatcactagctgtcaaagctctttggccgcatagtgcctgtcctgtaacatagttggtcacttaattataatattgtcttatagtcttaggttacttcttattgccttcttgttttattggcattattcttggcctcttcgtgaacaggggctgtattttaagcttttcttccctccccccaaatttgtctagtacaattttaagggcactgcaaagtcctgaaagtttaagattcatgcagacttagacttggctttgagttcttgccccttcactgatgaattctgtgatctttggcaagttctttaaccttttaaagcctcggtttcctcatctgtaacatgtatgttatagtacctacctccttgggttgttgtaaggattcagtgagctaatatctgtaaagttcttagcacagcatttcaaattaccttttattcattcattcaataaacatttactgaacaccagccatgtgccgggcactgtaggttacaactcagtggttctttttttttttttgagacagagtcttgctctgtcgcttaggctggagtgcagtggtgcaatctcagctcgttgcaacctccgcctcccaggttcaagcaattctcctgcctcagcctcccaagtagctgggattacaggcatgcaccaccacacctggctaatttttgtatttttagtagatatggggtttcaccatgttggccaggctggtctcaaactcctggcctcaagtgattcgcccgcctcagcctcccaaagtattgggattacaggcatgagccatctcacccagcctcagtgcttcttaactggggagaattttgccccccgcccaagggacatttggcactttctggagacatttttggttgtcacaactggaagagggggcctctgctggcatctagtgagtagaggccaaggatgctgctaaacatgctacaatgcataggacaggctcctcaccacctgccaacagagaattatctaggccagaatgtcagtaatgctagggttaagaaatcctcctctagagaagcacagtgatcaaaataagatagaaaaggttcctcgactcataacatccatactttagtgagagaagacagacaataagctagtaacacataaatgaacctgataactgcagatgatattaaatgctgtgatgggaatcgggcaaggtactgtgatagtgactggggatgggggtgtttttgatacaaggaggccagggacggtttctttgagaggttatgtttgagttcagtcttacctacgtgactagatggtgccagttaaacagtcatcaggaagaagagcagtctaggcagagggaagagcaagttgtacaaatgtcctgaggaagggacaaacttggcctgttgaatgaacaggaaaaaaactctcatggccggagtatagtgactgaagggtagataggaagtgaggttggcaagatcctatggaagcaggggttctgcacacttaactgtcaagggccagagagtaaatatatcaggctttggaggccatatggtctgtctcagctactcaactctagtgtgaaagcagccctagacaatatataaatcaattggtgtggttgtatcccagtaaaactttatttacaaaaacagaagaggtgctgatgtggcctgtaggctgtactttgtggacccctaatgtatagtcttgtggaacatggtaagggatttggattttaaaatacaattggaaatcctggaggattttaaagcaagggagtgacatgaagtcatttacagtgtaaaaggttcactttagttgtcatgtgaacggtggatccacagtaaatttgaaacagccagctattcccatgtcctttcacatagtttgtgacagtcacatttctatcatttactacacatgctttgcacttctgcgtctctgagcctttgctcatactgttccctctgcctggaatgctctttcactgtcagtaaatgacacagctaagtgccacctccttttccctctgttcttttccctcggaaccactcttatgttggtgcaacattgggcctcttcattgtagcacttattttattcagtcttgtgataatattgttataagagctgccacttagtgttaatgtttcagatactcttttaaaagcttttcatacattttctcattaaatccttgcagcaactctgtgtggtggatattagccccattttccaggtgataaagtgatgatttataagactgcctcacttgactgagttcacacagctagaaagcagccaagtccagatttgaacccagagctccctgatagaagcccttagggattatgccctagttgtgttggtttcccccactagtctgtgagttccttgagggcaggggccatgtttaattcatttctatgccctgtgcctagtacagtgcctggcaaataataagtgctctataaatgtttattacattgacttagcttctaataatgtaccatctattacaagtgtgctatcttcaagaccactagatgtcactggagatgcataaatgtggttagagtttaatgtgactgagaagatgttaaaacagctcctggccattttaacaaaggaaaaatgagccattctttgaattatgaatctggtcatagcaatctgttttcaggtccttgaccatggttcccttgctttccagatgcagccttgcatcattttctcccttcagtgttatttgtgttctgggatgctactgctacagcttctagtactgctattttttctgtgttgtctgtagtagttaatttaatcaataaacatttgagcacctattgtgtgtcaggtactgtgctagactctggggatacagagatgaattgagacatggcctttaccctcaaggaactcacagtctttttggggagactgacaggtaaataactatactctactgtgctaagtatcataataaaggactgtagaaagtgctgcagatgcacagaggagaaaatgattctgcttgaaggggtcgtagaatggttactttggaacttgaaaatcgcttaaaaaatgagggaaagcacattgcagctggagagaacagcatgagcaaaggcatgggaggcacaggagaggatggatttggggagatgagcaggcaggtatagctagaatggggcatgtagaagagaatgatgggaaatgaggatggaaaagtaggttggagtggggtggggatgctagtttgtagagagtcttgaatgccccacaaaagacttcagacttgaccctctgggttgtaagccactctcagagtcctttgtcaagggagtaacacagcgagctctatgctggcgacagctgactctcggggagagcctggcagctggaaaagcttccacgacagagcccgtgagcctcaggatgagggctgcccttgagcagttgggatggaaaggagagaagacttgagagaccgtttagaggaggaatgaacagagtttgtgagtgcccgtgtttagggaatagagaggagccagagaactttgtagtgaagcttttccctgggatacagaaagcaggaattttaaacagataaaacaagagttgtgaagaagcaaggctaatgtctatccattagcctatgaaaaacctgtaattgggccctctcttcagtcatcgtaacagaatgttgccatgagagctgcgaagtgaattgcactgtgccatccttgtttttggagctagccagtaattcttatttagcaactggggcagtgctgctctccctgattccgcttcgagtggacctatattcagagaaaaaaaatgctgtttttttctgaaactggtaagtaagattgcaggaagagaatcatgggtacaccctgcttgccttagaatccaagctgttgctaaggaaagtggcaggagccaaaaatctgcatcaacagctatagagaagcaagaaaacattaaccattccatagcttctgtgttgagaaaagtagttgcctgacaatgtatatgtgtgaatagaccattttttggcttcaaaatctcatttgctctttgtctttctcctttagggttggtgttgattcagaccaagaacacttggtaaatatgcgtttttgttgttcctggcatttctgtcaaatgtgcagtcatttggaaagaaaacaatctactataaacttcaaccttctatttagatcctgtcctctttgcctcagctttggaggaatgatatcattcctggcttttctcactgctccatagagacaaaaccaagtttgccacagtgccatagtgtgtggttatcaagggtgacagctttcatgtctctgggccatcctgcctgggcttttgtcccagaggagagcagtcttttaagcactcctgggttttcgagtgactcctctggcacggggaggctttttccactttggtttgcgcatgaaggcttgtctctgatgtaagccccactccagctgctcttcctgtgtaactttcaaatcgaatgaccagcagctgccctagagaactgcctagaagcttttgaatcttcaaccagtcttccctgcctgctcagggaaacgcactttcttaccttgcccctcagccttggccacgtttccttgcttccttccttctgttgtgtcagtttctcagttgttgctatgaacttgagcccgttggactgaatgcattgtaactcactgccctctctagactgactacccttgtctggtattttccatctgtttttcaattgcttctgagcaccattgaatatgtgtctccatatcagacgttagatgagaaatcacagaaattagatttttgaacatggaaagcatctctttcaaaacacaatttttttcttgtcagaaacaaaccacagtcagtatatttgtcttcagggtgaggttaaaaaaaacatttctcagattcatttcctaaatgctaattttgttagctgttgagtgatgagtgtgaatgtatgtatgagatatagtaagtacttgactcttgtggtcagagccttaaagtagaattccatgggcttgacatacttgtaaaaaccaagctggataaattcccatgatgccgggctcctggtgtagtgtccaaggggtgataattcctcagtgcctcctccctgtgtgaaaacaagaataaagttaatcatgcagttcaaaagacaaatgctcgatcactgtgtaagtctccaccagctgtgtcacctgtgtaaccacagaggagaaatggaaaaggagtgacagggagagagccaggtaggtgagtgccagtcgtgacatacagaacaaaggaccgttttttttcccataccttcaaaaccctatggctgggccgggcatggtggctcacgcctgtaatcccagcatattgggaggccaaagcgggtggatcacacgaggtcaggaattcgagaccagcctggccaacatggtgaaaccctgtctctgctaaaaatacagaaattagctgggcgtggtggtgggtgcctgtagtcccagctactcaggaaactgaggcaggagatcgtgccactgcactccagcctgggcaacagagcgagactctgtctggaaaaacaaaaacaaaataaaaaaaaaacaaccctgtggctgtcttggttatattgttcctttaatattttgaatgtccacgagaaagcacagaggaaccttatactaagtatggagtgtgtgggggtggggtatacaggtgttcatgtggtgaggggtggtgaaatgttgttcttcaagaggtggaggcacagaaagatacttctatgatgtgaaaggaattgcaggtgttcttcagctttcgtaagcccatacagtgtttccaaacatttttgtgttatatataagttgatacatgacacgtgacacgttgaagcagagagaaatttattttgagcattaggaaggacaggaagaagccaaaacccagaatctaaactctgtgcttgcttgcttatttatttatttatttatttacttacttactgagatgaagtttcactctgtcggtcatgctagagtgcagtggcacgatctcaggtcactgcaacctccacctcccagattcaagcaattctcttgcctcacccttccaggtagctgagactataggtgcctgccaccacgcccagctcatttttttgtgtgtttttagtagagacggggtttccccatattggtcaggctggactcgaactcctgacctcaagtgatatacccgccttggcttcccaaagtgttgggattacaggcatgagccactgtgtctggcctaaattctgtgcttttagaaaagaagattatggaaacatagaacatgagcactggaaagggccttcagaattctctaaccctcatcatgtttttatacatgaagaaattcgggcccagagagagaaagggacttgcttaaactacttaatgtcaataagctgggactggaagcagattgcctaactgcccaactgctgactgcaccatattacaaataaagacacagtttatatttttggaaacttttagaagacgcctacttgctatgttagtttctcctcctagctggtcaggcttaccatggaatttccctacttgtttttattttgctagtgtttcaagaacatagtagcaactttgaagttgctagttattttcgagatccatgacgactcccaaatatagggatgttgatgtgatattttctaaggtgctattattacattgagagttaagtctttcaggttcagtacatgaattataccacattgattttttttcttttttttgagatggagtctcgctctgtcgccgagtctggagtgcagtggcacgatctcggctcactgcaacctctacctcccgggttcaagtgaacttcctgcctcagcctcctgagtagctgggattacaggcaggccccaccacgcctggctaatttttgtatttttagtagaaacggggtttcaccatgttggtcaggctggtctcgaactcctgatctcgtgatctgcctgcctcggcctcccaaagtgctgggattacaggcatgagccaccacacccggcccccacattgattttttaagtgagagtagattcgtaagttagcaagcagcctgagtaatagaggtgttcagaaaaacatttcaatttcctattccaaagctgcaatatacaaactattaaatttctaatgttacccttgttggagagtgtcttataatatagtagcctctatttctgattctccaaaggaatggctctaaataaatgttcatatctttgtatagatattgatttctgtattatctatctgcagggtgttcctgaaaatgaaaggagaactaccaaagcagagagtgcttggcttttccggatgtggtacaactttgatcataagtatccttaattgagggaaaaaaaaaaaggataatgtggacatagataattacagtttaatggaacaagtgttttgactattctcttcctggagcagaatataaaacctacctttcatcttccctttccccatcagtgctgtggaaaaggaaacccacacagacagattcctcttcaaacccatgaaaccgtagggactggtcatttcagaagctggctgtgtaaagggaaccaaagcccaaatgacatactttctttgatatataggtttatttattgagcaaactttaatatttgttgtcctttagctaatttagtgaatcccacagaaggtatttcttggttcttgtctgcgtacttggcagggtaagagaggaaaggcttgggaaaaagcatgagaatgaaatcaaaatgcgataatgttcaatactgcgctgttcagcaatacacttttttttcccctgacctttccaaagactaggagattctctctgttcagcatgccacagatagctaatgtttttgtttgccagatttccttcttgccctgttgtaagtctgtttcatagctgtactttgagtagtgttgatattctataacctctttaaatcagggatccccaactcccgggccgcggaccagtactggtccgtggcctgttgggaaccgggccacacagcaggaggtgagcaatgggccagtgaacattaccacctgagctccgcctcctgtcagatgagcagcattagattctcacaggagcccgaaccctgttgtgaactgcacttgcgagggatctaggttacatactccttatgagaatctaatgtctgatgatgtgaggtggaacagttttatcccaaaactgttttgttcccagcccagtccatggaaaaattgtcttccacaaaaccggtccctggtgccaaaagagttggggaccactgctttaaatcatgccttttaaacattttatcattattaaaattaatttcttatttgaaaattcacctagcaaaaacagccatggagttctttcaggctctgatttatcagtaaatgattcaaaacttggtttatgttctattgaagcaaattggagacaaccgtgtaagaaatttgtccttgctttcaactttctgatgaaagccttgtatatttaagaaaaatcacttgacacttaatgattagaagctactacttaccatgttctgtttggtaatttttgcattcactgcttgcaagtacttcaaaattaaattattgtatggaaacaagaatgcaagcatatctggggtattaagactcccattagagaaagagagcctggctcttaaaattttttaaagattatgtcattacttttggctccattgtcagggttttggatataagccactctcatatctcttggggctttttcatccctctaatttagcaataattttttagtgagttttctgcataaaatgttttgtacattttctacataatatataaaacagttcaatgatcctaatgttgagaaagcgtagaataatagcttattcttctgtatattttatggaagtaaacaccaaggcttgtttgactcagtactgccctattaagtcctactcaatgaagacctgatcattttaatacctagtgccctgatataattaaatattcattattttagatttcagttcatttgtgtaggcaaatgatttgttataattgagctataacttgaatacaataaagtacacgaatcttaagtgtacagcttaatgaatttcaacctgtgtcaacaactgtgtgcctcccacccatacaaagatacaaatgaacattctctatccccctccacaaaggggtaaccatgattctgactttcatcaacatgggttagttttacctgattttgatctttatatatatggattcatatattaggtattcgtttctgtcttgcttctttcactcgacatctgtgtaatttatccctattgtttcatgtaacagcaattcattctttttttattgctgtagtagggtagagctctgtagtaggaatatactacaggatttttgtttgtaaccagtctactgttaataaatatttgggttggttctagcttttggctattacaaaaacctgcatgaatatatatcttttggtggacatagcactcatttctcttgggtatataccaaggagtgcaaagagtggaatttaggacaagtatatgtttaacgtgttttttgtttgtttgtttgtttgtttgtttgtttgcagtagtgtctggctctgtcacccaggctggaatgcagtggcacaatcttggctcactgcaacctctgcctcccaggctcaagtgatcctctaaacacagcctcctgggtagctgggactcctggtgcatgtcatcacacccagctatttttttttttttttttctcaatgtagagacatggtttcaccatgtttcccaggctggccttgaactctgggactcaagtgatccacccacctcagcctcccaaagtgctggaattataggagtgagccacttgcccagcctgtttagctttaaaacagacattgccaaccaaccagttttccagagtgattgcaaccagtttaattggttttaaccaacttggtgaatttatgattatttccatcagcaaattaagggagttctatttttcagtcttttaaattttagccattttgatgggtgtgtagtgatatctcatatggtttaatttgcatttctctgatgaccagagaggctgagcaccttttcttgttttttgaccatttagatatcctcttttgtgaagtctaagtctttcgtccattgtttaactgagttgtttttttctctcattgatttatagttctctctatattcctgaattgggttttttgttgttgattattgtattttttctcagtctgtagcttgccttttcattttcttaatcctgtatttaaggagtagaagttcttcaatttaatgaagtctattacattttgtttatttttaagataagttcccactctctcacccaggctggagtgcagtggtgcaatcatagttcactgtagccccaacctcctgggctcaggtgatcctcctgcctcagcctcctgaatagctaggactacaggtgcatggcaccacatccagctagtttttaaaagttttttatacagacaggttctcactttgttgcccaggctagaagtccattttattcaccttttatggttagtgttttctgtgtcttaagaaatcttccatatcccaaggtcgtgaagatattttcctgtttttttctagaagtatgattgctttaactatcacatttaagtctttgatccatcacaaattcatttttgtgcatggtgagagatagtgggtgaagatctacttttttccatatgcatatccagttgatgcagcaccatttattgaaaaatatcatccttaccccactgaattgcagtacaatctttgttgtaaatcacttggctgtataagtggggataagtttctggactctcttttttaatcctgtttctctatttttatatcaataccacaccctttttattactgtactttataataagtcttgctatccagtagagtaattaaaatctggctttgttcttctccagtatagccttggctattttgggtgctttgcgttttcctttaaattttagaaacagcttgtcaatttacacacatgtgcatgtgcacacacacgcacacacacaactgctggcaagtttattgggtttgtattgaatccataaatgaatttggagagaaatgatatcataacaatattgagacttccatatcataaacacagcatattgctccactcatttaggtcttttaaaatttctctcattaacgatttgtacttttcagtacacagctcttgtacattttcattagatttattcctaagtatttgatgtttttgatcctattgcaaatggtatttactctgttttatacttgtttgatgtaaatatatagatagaaaattggatatttatttatttatttatttatttatttattgagacagagtctcactctgttgcccaggcaggagtgcagtggcacaatctcggctcactgcaacctctgcctcccggattcaagtgattcttctgcctcagcctcccaagtagctgggactacaggcgcccgccaccaggcccagctaattttttgtatttttggtagagatggtgtttcaccgtgtttgccaggatggtctcgatctcctgaccttgtgatctgcccgcctcagcctcccaaagtgctgggattacaggcgtgagccactgtgcccagcctaaaatttgattttatatatggaccttgggtccagcaatcttgctaagttcacttatgatttctaatagatactttttggtcttctatatacataattaaatgatctatgactaattatttttttttcttttccaatccctgtatttcttttttgtgtctttttacatcagcttttttaggggacttcttcagtgcaatggtgaatataagtgatgatacaggacattcttaccttattcctgacctcagagggaaatttttcaatatttcaccattaagtacgatgttagctatacgtttttggatatatcctttagcaggttaagagcattctcttttatttctagtctgctgagagtttttatcatgagtttttgtctgctgagaatttttagtatcagatgctttttctgcatcgagatgatcatgtgtttatatttttcttctttaatctgttattttgattttcattgattgattgtttgaatgttaaactagtcttgcattgctggaacaaattccacttggtcatgatgtgttatcctttgtgtatatctctggatttaatttgctaatattttgcatctgatttttgtgtctatttttatgaacaatattggcttgtgattttttcttatagtgtccttgtcaggtttctataacaagattaagctggcctcataaaatgaatcaggaagtattccctcattttctgttctctgaaggagtgataagattagtgttattattatttttttttaatgttaggaaagttttaccagtgaagccatttgagcctggagctttctgtaggagaaagtttttaatttcattaataaatacaggactatctaggtttttttttctttttttttttctttttttaaaaccatttgtcatcatctggcgagtttttttttctaaggaattttttcttgtagagtcaaacatcaagacttgttagcctcagtactacccattcagtaccagaagatgaagacctggtcatttctttactcaaaatgctagaattcatcattccagttttttagtagctttgtgtttggccagatgttttataaagcgtgtttatatgcagtgttttaatctttacttagaatttattaatatgaggattcatgaaattttctctgactttctcatttttaactgagaaccaccttagggtctcattttagaaaatgaggagggagggcatggaggctcatgcctgtaaacccaacactttgggaggctgaggtgggaggattgcttgaggcaggctcagttcaagaccagccctagcaacatagcgagaccctgtctttgcaaaaatcaaataaaaaaaaattagttgggcattgtggcacgtacctgctatgatcacccactgcactctagcctgggtgacagagcgacactgtctcaaaaaaaaaaaaaataaatgaataaataaataaagtggggaatttgtgtgtctgtatccttttctcctttttcttgtgattccctcttttttcttctgagtgtcatatattctcatgtctatttttattttttggcaaataaatgaatactgaaatgagggcctatgataaagggcctcatgatacatagttttttaaaatgtcttgagatttgacttgcctttccttcttatagcttcctaagtaaacagtcagtctgatactgaagtttcaacttataccatgcaagaggccagctgaattcacaataaatgatgaaaaccattttattactatgttctactggaaaatttaatttcctctctggccattaacattgtttactttctcccttatctcctgtagtgcccaatttacagtgatgttccttttggttttagtaaaatcagaaaagcaatgtgatgtagtggaaagggcacaagatttgaaattcagaccaatttgggctagcagattggtccccatttacctcattgtgtagctttaagcaggtcattgacctctctgagcctcagtttccatatctgtgaagtggagatgataaaatacccctttgctgtttcactgccatcatgtgaggaggaaatgagaccatagatgtgaaagccctttgctgtcctccgaagtggttactatactatgatggtgattattatcaaacgagttgctcttttaaatttgtaaagaaaggaccacagctcttccttaaccaccgcagctatctgaagcctctgctgacccacagcgggcctccgctgacaacaacactccctgcctgctgtggacccatcgccaggtgcctcaccagcccccaggcttacgaagtaagttggttttatccaaaactaaattcttcagtaagttaaatttatctgctctgtggatgagtcactggttttattttattttggtttgtttttttgcctttgaggtataaattccatgaaagggaatttaagcatattttgctcaaccagaaaatacactgaaacctataaatataattcacagcctttgaaacagcatttgaaaacagatatagaatcgtgcctcatcttactgtgggtgattttagtaaatagttctatttccctgctggctttcatttctttgcagtatgtgtcctgagctcagcactaaatgtgtatgctttcctccacaaatgagggttgtctcagttacattttgaggattttaaaacaattttgacatccctaaagtgcaacagatggtctattatttcacacctcccaacctttggatgtttgggaaagctatctgcctctgttccacatttctgggacacatgagcatatctagatagaatctgaattccatattttttccttagctaccaaaatgtgattggtaatttgataaatattgctactaagaaaaaaataacagaaatcctagctgacctttgtttttaaatgtgcacgtttttatttttcaagttcttttttaaaaaccttccattctggccaggcgtggtggctcatgcctgtaatcccagcactttgggaggccgaggcggcagatcacctgaggtcaggagttcaagaccagactggtcaacatggcgaaacccagtctctaccaaaattacaaaaattagctgggcacagtggcgtgcacctgtaatcccaactactcgggaggctgaggcaggagaattgcttgaattggggaggtggaggttgtgagcagagatcatgccactgcactccagcctgggtgacagagtgagactctgtatcaaaagaaaaaaaaaagaaaaagaaaaagccttccattctaaacaaacctttcagaaataatctatgacatcatataggctcccctgttaacaaagcccaccagttttgactacttaggtgcaacacgcagaaccttgagaggggaagctgtagtgaagctgtgtagacatgcaccacacacacctccctccccgtgcccccattccctgtgagtgaacctcatgtgaaaccagattgtataagaaatggacaggagagagtaggcagagtaggggtggcatctgggccagggaggagcatcctacggctttgtgttatgtcgtgtcagtgcatgtttctgacagactgtgcctgtgagatggggcacacaccccatgttgcccctcctctcccttccacattgcccaggctcgcctctcaaacattgtctccatttccaccatgccctgttaacccacataactgtgcagagaagtcagccagctctgttggttcaggcagtgaagcttggctcttggattccagagacccactcgctgtcaccaaaagccagaagaggtccacaacaaacctgtgtccttggaatgtagcgaaacacaacaggctccctagagcagctgtaacaaagtaccaaaaccgaatggcttaaacaatagaaacttatcatctcttatttctggaggctaaaatccaaagtcaagttgttggccgggtcagttccttctaggctgtgagggagaatctgctccaggcctctcttctaactcctggtggcttcctggctatcttggaccttccttgacttacagatgcatcactatgtatctctactttcatcttcacatggggttctacctgtgtgcatgcctacttccgtgtccaaatttctcctattcataaggacaccagtcatattgaatcagggcctaccttatttccaaacaagaccctatttccaaacaaggttacattcacaggtgctgggggttaggacttcaacatcttttggtggggggttggggagggacacaatttaacccataacaaccatcacacttaattttttttttttttttagacagagtctcactctgtcacccaggctggagtgcagtggcgcgatcttggctcactgcaacctctacctctcaggttcaagcgattcttatgcctcagcctcccaagtagctgggattacaggtgtgcaccaccacacccagctcatttttctgtattttttagtagagacgaggtttcgccatgtcagccaggctggtcttgaactcctgacctcaagtgatccactcaccttggcctcccaaagtgttgggattacaggcatgagccactgcacctggcccaaacgtaattttttatattatctttgttaactgctttttttagttataacactagcaagctcatggccaaatatccatacagtatggaatgtacaaaatgaaaaatcaaagttgccttcctcctacctgcagtcctcgaggcagtctttattataggctcactgtggatacttcctgatatattttattgcaaataaatatgtgtatatatggctttgttattgttttacacaaatgggattataataggcatattgtcccattacttgctttttttttcaattactgacacatcatggatacctttatatgtgagtatgttagatgtcttaccttctcttttcatggctacgtcctattccatttcatagctgtagcaaaattcatgtattcagtctcttatggatagatgtttcagtcatttccttttttgctattataaacaatacttatagtgaatattcttttacatataaacttacctaactatgtaaaagtatatagaatagattttaaaggtaaaatcactgggtcaaaaggcatgtgcattttaaaatttgatagatattgccccaaacctcaaacttaataaagacactagaaggtgctgaagagcccctgtggacctgtgaaggagccacagagcttgtgagtattgctgaattaagtgatagatactggttagatagacttactgtcctaactagattagacaggaagggatttgggctggttggtggatatgagtttgtttgtttgtttttgagatgggttctggctgtgttgcccaggttggcctcaaacttctgggctcaagcagtcctcctgccttagcctccccagtagctaggacaatagacatgtgccacccatacccagccgtttatttttcagttcacactttttttggtctttgagtatttaggggaatttctagcaacagcagattaaattcctttttagattttgtctaatagtcttctcagtctatttgatggtcttagacaaattcaaaattttcaaacagacatgggatttagaaagctggagaatatacttccctcaaggagcatcaatgacagactgttttatgctagatcaatgtgaatatttagaatgatcctttctctttaaagtcatttagaaaaaatgacttgttctgttttttaaaagtaatatatactcattataataaaatttcagataatacagaaacataaagaagaaaagacttttctatacacacattttttatttgccaatatgggactatgtattcctgattcttttcccttttgtagaaccttatttaagtatactattttggtcgtaatatttccatgagaaccaaagcttatggagctgcagtgagggcttgatatgtttctctgtaccccaaactgtattaggtggttggactacgtagcattcaccctgtgtcttcaccacatgtgaatcggtctgctcctgccacacactagactctaagcctcttgagggcagattgatacacacacagttatagctcaagggtaagtgccactacagggagagggccaagtataggatgccacgaaagcacacaggaaggacagctaacctagtcctagaagctcaaggaagacttcagagcaaaagtgataaaaggatgttagtcatttgaagggaaagaggggtcatgtagaaggacctgaaggtaagagaaagcacgaggagtctgggcagctgtcacacttcagtctggttggcagacaatggggcctttggtgtgggaggggcagattgtagcaggagaggaactaaggatgccaagtcacgctgtattttaagccaaggtatggactttagactttatcctgagggcagtgggctaccacttaagggttttaatgggggatcctcgaaaatactcctattggaaatgtctcttgaacttctcaaaaattcttaaatcttactttatttgcatttagaaccaggaacagttgaaagatgatgattctgatcttattctcaatgatggtgacatcagtttgacatatggagattctactgtgaacactgaaccggccacatccagcgccccaaggagatttatgggaaacagttctgaagatgccttggatcgggagcttgcatttggggaccatgaactggtcattcgaggaacacgcctggttcttccaatggatgattctgaacccccgctaaatttgttagataatacgagacatggtccagcctaagcttactaatactcacttagtgatttgtaaaatttgcacatgtgattgtgaagaaatttgtactacctaaaagtcccagtgcatgtctctgaatgtgtaagctatataaatgctatttatatggcatagaaagaatataaatatcctgtacacggcagattgtgaacaaactatattcctttaagttttcctggttgcactctgtagactggatctgttttaggaagttactttcacagtgatgttgtgtgttctgttagttttatgtctcagttaaagtgtaaaaagtgacggattttctctttcttaaacttacctgacacttaaccagagtaccagttctcgtgatgtgaattaatttttttgtgtgctaggggagggagagtgaggagggagtgttatttccttgggaacctagggaggagaggttcctttgttgggaaacttttgttgatagctgctgcctttgtcctgatcgttttctttcccttttctctggtggcctgttgtggtgcaacgagctgatggcatttgatcttgccccattcaggttggggagtgaagtgtgaggacccttttcccccgcttgctgtgaaagcacagattcattgactacagtacactgttgttcagaaaagaaggctgcaaatgacttctgagactttatgtcttttcttccagaccaagaccgtagaaggagtcacatctagccggcttagccaaagtacaggtgtatatagttcagggcacttgatttagatttggaggggctggggtgggcagagagcaagaggcgagtaaagagaatggtggtttcagagatctctcttcccaaatgtgtaaatattctataccagataagtttaaataagaaatttaattgctgcttaatttttgattatgtactttatctgtatagcaggctttgtcgtcagaagtttttatatcgatttaaattgctgctctttagcagccaaacaggagcaaaatgtaaaatttttgaacttactgtgtctaatcatcatttgttagtctgtagttaatgtcaacagttaatttatgaacccacgatcgttccacactgcaccaaagtcagtcataagagaaatcgaatattctggagcactgattgcagcagggtggctcctttgtgtgcagcaggtgtagtagtcttcattttcatggtacgttttaatattaattacctaagctgccatgcatttttttttttacagttctcaaggaagagcacagaacaatttctcatttcatatttggagtatgaaagtagattctattttgtaatgctgataatacctaaagatgcattgaatgcttggaagaatgctttttgatgttgattttgacctgttcatgattcagaagaaaaacaaacttttttggattttttttccctcaggtctgagtagcattgccttaaatcttatccagttagaacattgatttatttacatgatgttcagattttccagtgaaaaatacccttctgaacaaaacatgtacttactctccgaaaggcatctatctgtgctattgcaaacactccttgagattttaggggaattctaatgttgtaccctttcgtggcagctttgactgttggcatagccatttgttatgtagtggtagcgactttcctgctatgcaggaatccctcccatgacgtgtatgttttacatgatgtgtgcctcttcacgcagtaaatagtttcttgttaatgtatgtttgaggagtttgaacgtcagtgtcacttacccacaaagttattcaagttgtaaaaggttatacaataatttaacaactaccttttttattctgtcgggttactgacctcactttatgtaaatacttcgcatgacaaattcagtaactcgtctatttcagcatgcataagacttttcactagggaaactgataaagcttgagtcaactaaatctgccttcatactttatcaaggggaaccaagcctgctgtgcttacatcagcatctggaagactttcctctcctctaatctgtgtacacatctccaagcaaggaagaaaaaacaaactctgctcagacgcctatgaaacacctgaatgaactttgatgaagtacagtctgagttaccatcatgcacaagtagaactgctcttggacttgttttcctgttgtttgtggaacctacgcgtttgaatggcttgaacgttgcatcttttaaagttattttttaaggtttcttggcatttatcctagttgtccgtgtttggcaatgtgctgttaaagtaatagacttttaatctttatgtattttttgttttctctggagtacttggacagatgttatagtggtttcttttaggaaaatctgtcattaaaaaagttatagccttgcaaataaccactcacagtatttgagtcacagtttattttagtgagacgtaaagagtgctgacttcatttatttttctacctatatacctagtggaaaaggggaagactaatgttttcaaataaacaaacagaaacctaacagaa

SEQ ID NO: 18 - DNA, 23071 bp, Homo sapiens
agtacgcgtgggatttggctccgaggaggcggaagtgcagcacagaaagggggtccgtgggggacggtagaagcctggaggaggagcttgagtccagccactgtctgggtactgccagccatcgggcccaggtctctggggttgtcttaccgcagtgagtaccacgcggtactacagagaccggctgcccgtgtgcccggcaggtggagccgcccgcatcagcggcctcggggaatggaagcggagaacgcgggcaggtaataccggggccagcgccgcccctcccttgcgcccctcactgctgggcaggctggctggcgcgcgcgcgcgcacgcaggggtcttttaaatcccggccggaatacaaaggccggggccgcgcgtgcgcactgtggcctggtcggcctttccttccctggctgcggcggtggtggtggaggtcggggctgctctgagggttacctggtgcacctggacccttctttggttccccgcgataaccagttgactataaaatatattagtaagcattcagcagtctttggttaatgtgtctttctggatgccattcttggctagaagggttttccgtcaccctccattaccacgcagagagctgtaaagatgagtgtcgaacatttccagctccaggagttttcattttaaagttggttgatttgttgcggcttccccccaccccaaaggcctactgaaagcaactttaagggtcacgggttagataattttgttgtgggcatatgtatacactctcgagtagtcaatctaaaaatgacctttgagttttccagtggccttggggacgatcttaagaatccgtttttaaaaagtcctttgggggagtcaagagaaaaatttgcaaaagcaggagatttagggacttgaactcctggcggaagactaaatttttaaaaaatggatatggtgacagttttttaaaagataaagagtgatgatttacattgaaattaaaaggaaaaaaacctatgcctaatgaagaattatcctgactctcagtggctaatgggagctgaatttaggcaatacaagggacttatatgggcctgttcatgtctgtaaagttggcatgtctggaatctgattctgacatgccgagaattggtgttacatgaaagggcacactaaccaaaataaattagagcttaggaaaagagatatatgtagacaaagtgtggactttatcttgactttgtggatcaagtcctggaataaattactccacttctttcccagaagaactttacaaataagagaattcaccagaatttgtggaaatctctctctcataacctcacttaagagcagaattgaaacttgggccaagaataaattacacattgtaagactttattcagggtcttacagcaaaatagtaggacttcaatacactgtttagctcaaagctgtgatatgtcggcctgacttcatccaaaaggctatagaccagattttattttgccttgaaaagctttcaccttcaggaactgtggaaaattctgtgtaatcttctgaaatgactcagaccccaggtaatccttaagagagtagttctctgtcacccttgactgtgctaatcaagaaatgtaatgtgggatgtgaaaaaaaataaatttactttttttttttttttttttgagacagagccttgctctgttgcccaggctggagtgcagtggcggatcttggctcactgcaacctccatcacccgggttcaagcgattctcccgctgcagcctcccaagtagctgggattacaggcacctgccaccaggcctggctaatttttgtatttttagtagagacagggtttcaccatgttggccaggctggtcttgaactcttgccctcaagtgatccacctgcctcggcctcccaaagtgctaggattacaaatgtgagccaccgggcccagccgacttttttagaagactaatttcagatattcaaagaagaaaattcaaattccatgaatacagacttttttttttgtttttttttttttttgagacagagtttcactctgttgcccaagatggagtacagtggtgcgatcaccgttcactgcaacctctgcttcccgagtttaagcgattctcatgcctcagcctcccaagcatctgggactacaggtacccaacaccacgcccagctaattttttgtatatttagcagagacgaggtttcaccattttggccaggcgggtcttgaactcctggcttcaagtgatcactttggcctcccaaagtgctgggattacaagcatgagccaaagcgcccagcctagactttatttcaatggcaaaatagttcaggagtcttagaaagtgcttacagtcaatcaaccagagaggaataaaggaggaattttctaagggtactggggagtttcccgtgacctcaggcgtgaaaaagacatttaccgaagatggaaaataggatgccaaatcaaaagtaactggaagagagtagcatggaccactaagaataccaacaggaaagattaacccttgcatgagagtagactttatagaaatgttaaggagaccaggaaggactgttttggttagatgttgacaacaagaagaataaaaaagatttgggttttctccccagtctactggcatggtggcagcagacaacagaacacctaagtactttgttctgatttggattttacatctcctatgttagcaaaatgattgtctgactggaaatggcagaatgaatatctgtaagacttaaagctcaagaccagtgaaggcatttaggagaagtttcaggtgttctaacagaatcatatgccttggcctgcgtgtgttgtgtttcaagggagaggccagattaaagcagtgttagaggatttgtagcaaatgtaagggacctggaaataaacacgtgggttcctgttcttccagaggtggagtctgtcctctgttgacattgatcctgaacaaaatttttacttaatcaatggttactgagcatttttaaaagaaactaattgaccgggcacagtggctgacgcctgtaatcccagcactttgggaggccaaggcaagtggatcacctgaagtcaggagttcaagaccagcctggccaatatggtgaaaccccgtctctactaaaaatacaaaattagctgggcatggtggcataactagtgaccactacactacagtatcagttcagaaagaaagcaagacctatactagacaggcagcatcagaaggatgctggcaggaggtacctacagtagtcattattatagcaaatttattatataccaggtactgttttggatgttttacataggccaactagcttaatgctcctaaccaattattaggtactattcccattttacagatgtggaagcatgggcataaagagattaaggaacttgcccacagagctagtaaatgggagagctgaaatttgaatccagatgacctagcttcaaagtctgcttctctagctagcaaatgtgctttactgcctctcttagtgagcaagatggagatggactgatggcaatccagttaggtgaaataaaaacctgacttactactgaaagaatcaggcagactgaagagaggtctgtacttatatgccatgtatctctatccctaactttgttcctttcagtaccttaacgtcagggtgctgatggcatggtgataaaatttgtgagtgacccaagcctgggaggaatttgtggaattaactgattgatttaatcagagtccagataaatcctgactgactggaatggtgaatcatcttttacaaagaagaggcacaatcctatactcagctgcagaaaaatcagtgataaagtgtggaatgagggagaagtgatacaaggacagtgttcgttgatgggaaactcagtgtgaatcaacagtataatgtgggtgccagtatagctagtgtcatgggttctgcagtttgtctccaaaatgagcaagttggtagccctgctcattttcgggctgatgaggctttatctggagttttgtttgattccgagcaccaaaaaatgaagaaatttgaaatcatactacatgaggaattatactatttgaggaatactgtatgaggactggcttattctaaatctttatatttacagtttctagtagactgtacatatggtgaatacacagacctccatctagcaataccaaatggaataatagttatggtgctatcgcatcataatttacataaccagacccctttagttgagcatttggattatttagccttgttcattattttgtaagtattcagtatggtatatgctttttttaagtgaagataataaaatgtatttagaaaatagcaacttaggctgggtgcagtggctcacacctgtaatcccagcactttgggaggccaaggtgggaggatcacttgagaccagaagttcaagactagcctgggcaacatagtgaagccccatctctacaaaaaatttaaaatttagccaggcatagatgcatgtacctgtagtcccagctgctcaggagactgaggtgagaggattgtctgagcccaggtgtgtgtggttactgtgagctatgatagcaccactgcactccagcctgggtggcagccagaccctgtctcttaaaaaagaaaaaagcaacttaaatccctaaaatagtgtaaaataattgaagataaaagaagttggagtcattaattttagagaaaaccttaaaaatttagttttttgaaatacagcaaatctagctaggcatggtggtgtgtgcctgtagtcctagctactcaggaggctgaggcaggaggatcacttgagcccaggagttggaggctgcagccaactatgatcatgccactgcactccagcatgggtgacagagtgagaccccatctcttaaaaaaaaaataattaaaaaaataaaaaaatagcaaatctgaattaactggacttcttaatgaactctatgcgtggagtgtgtgtatgtgtgttttgagaaagactatcagaaaatatagtcgaccttccatatctatggattctgcatctaagaattcaaccaactgtggattgaaattatttgggaaaaaaaaagacaaataacaacattaaaaaatgatacagataaaaagaatgcaggatgacagctacttacatagcatttacattgtattaggtattataaataatgtaaagattatctaaagtatatgggaggatctgcataggttatatacaaatactatgccattttatatcaagcgacttgagcatccttagatattggtgtctgtgaggggttctacaaccagtcccccatgtatgcaaaactaggtacataccacagtccatttttagaaagattgattagtaactaaaggatgactgtacacaattcatcagttccaggcagctataagaaaacaatctagccggacacagtggctcacacctgtaatcccagcactttggggaagctaaggcgggcagatcgtgaggtcaggagtttgacaccagcctgaccaacatggtgaaaccctgtctctactaaaaatacaaaaattagcccggtgtaggtgcctgtaatcccagctactcaggaggctgaggcaggagaatcacttgaacccaggaggcagaggttgcagtgagccgagatcatgccattgcactccagcctgggtgacagagcgagactctgtctcaaaaaccaaacaaacaaaaaacaacagaaaaacaatctatgagcgctgcagttcaacagaaggtaagtgcaaatggaggctagcagagaaaaaggggtaaacaggaaaatgagggagagtgagaggtagtgaagaatatttgagactaagataaatgatgggggaagaaaagtgaacgaagagaaataaaatcaatcgtgcttgtaagtttaacatcaggaagttatacaaagtagaaagtctttggggtctgttttgagtctagacagatctagtcctatttcctatacattgtccacatatgtagaaatcactgaatctaattcctcattttcatggtgagggaatggataccccgagaggataaatgactaaatgctctttgttactgtccttctcatagagttattgctcagaaacattgcagagttctggattataaagtagcaacgatcattatgcatacacaaatgtatttaagaaatatcctcacactgaggttgaaacaggtttatgctgcttatacatttagttgttattataatagaagataaaattatccagaaccccccttttttttttagacagagtcttgctctgtcgcccaggctggagtacagtggtacgatcttggcttactgcagcctccgcctccctagttcaagcaattctcctgcctcagccttccctgtatttaggattacaggcgcatgccacgacgcctgactaagttttgtatttttagtagagatggggtttcaccatgttggccaggccggtctcgaactcctaacctcgtgatccaaccccctcggcctcccaaagtgctgggattacaggcgtgagccactgtttccggccagttatccagaactgtttagttaactagcattcaagtttatgaagatttttgtgtagatgtaatgcttgcttctgccaaggaataagaatgttgtaatccaccatcttttattctggcttttaggcagctgttgaggtaaacaaactaagtttaatgctcgaagatagtgtattcctcagaactaacacatttgattttccataggtttattttcctttacctgttctaatttaactttttgtaaaatgccacagtccatttttagaaagattaagggatatttcattattatagataagtttctaggtttctttcaaacttgatatacctaatataaaagttcagattatttttcctctttatttttcactttttattcagccaactgtgatttctagaattttgattttcagcttctgaaccccagaatttctgaagatgattaatgacctccgactatactaaaagttttgaaaaatttttttaaagtaaagaatcctgttgtaatgtgaacggtgtctccctaatttatgtattttcagtttgcattttcatgaagtgctcaaaatgggacatgtgaaattctgagagtagtagtaagaaacatgggagagtggtaggtagattgccttcctgaccatgtgacagagtaaaaacacgtttcatacatttttttttttttttgagacggagtttcgctcttgttgtccaggctggagtgcaatggcatcatctcggctcaccacaacctccacctcctgggttcaagcgattctcctacctcagcatcctgaactagctgggattacaggcatgcgccaccacacccagctaattttgtgtttttagtagagacagggtttctgcatgttggtcgggctggtcttgaactcctgacctcaggtgatccgcccgccttgacctcccaaagcgccgagattacaggcgtgagccactgcacccagccacatctcatgcattcttttgctcgctcatttattgtcaccatatgcctttgtttctatatattcaagctaaatcaaggtgctattagaatctcgggaagctgccgctgaccacagtcagaacttgcagtttctttagttagaattgccataggaccactgctcaagacttccagatctaacctagccatatccaactcatcattagaatatttaaatcatgaatgttgaacaaccaatattttaacaatttattgcatagagctactaataatattaaataaaactatggaaaaaaaggacattttactttgtgccaggtatgcttctaagcatagttctacatcttaacttctagtccctgtctacatattttcccttatgtgtagccttagttatactattttgtattcttttctgttttaaaatatatataaactctttcctgttcttttacataagataaataaacttaattttttagctgcatagtattttctcatgttaatgtattgtagtttactaagtcataactttatttttatttaatttgtgaacaataaaagaaataaaactcttatgatacaggttaatctctttctcactcattcttaatctttgctttaccaacctacccttaaagatagctggaagtggaaatgcctctccagtggtttgtccattgggattgggcttctgtttatcttgagctgccaacatttagcccagccgctgggggtggtctgttatcctttgtttccccaggccatttaagcttatccaggaaatgctttagtttgccttttttttttcctgttaaccattttattgagatatgatttacatactacatagttcatccatttaaagtgtactcatttgccctcttttgttgttgttgttgttgttattgaggcagagtctcgttctgtcccccaggctggggtgcagcagtgtgatcatcgctcactgtaaccttgaactcctagactcaggcaatcctcctgcctcaccctcctgagcagctggggctgtcagcatgtaccaccatgcccagctaatgttttaaaatttttttgtggaggtggcgatcttgctatattgccccggccactcttgaattcctggcctcaagtgatcctcccgccttgccctcccaaagcactaggattacagacataagccaccgtgcctggcctcatttccctttttaatctgctttctgagcttcctgttctctttcaatgaatatcatagagaatgaaaactgattagtatagtatcttgcagtagaaaacatgactttcgctgggcgcggtggctcatgcctataatcccagcactttgggaggctgaggcgggtggatcgcgaggtcaggagattgagaccatcctggctaacacggtgaaaccctgtctctactaaaaatataaaaaaaaattagctgggtgtggtggtgggggcgcctgtagtcccagctactcgggaggctgaggcaggagaatggcgtgaacccgggaggcggagcttgcagtgagccaagatcgcgccaccacactccagcctgggcgacagggcgagactccgtctcaaaaaaaaaaaaaaaaaaagaaaaagaaaaagaaaacatgactttcctctccaaatagtaaagcaaacttttccattttattttctactgtttttcttctcctgcctatttaatggcattatttggcatttgctgtaacttgagtttcatcaaatatgtgtttacttctctggttttatgctaacagcaacaccatgagatagtggtttaaggccatgagaagtattttttttaattgttttctttgaaagcccacattgtttcctttgaacagaatactttgaacaaaatttaaatcgtgttcagaagagaggtttagaggttttttccttcataaattcaacacatgtttacaaaatatccatttcatgtttctctttagtgactgaatctattttgtgttgctgtttcagaatgccatagactgggcaattaataaacagtagaggtttttttggctcctacttctggagcctgggaagtccaagatggaggggctacatctgatgaggggcttcttgctgcgtcataaaatggcagaaggaatcacacagtgaggcagcacttgtgacagagagataggaaagggagttgaactcatccactcatcgtgttatcaggaaccctctcctgtgataatagcattaacccactcctgaaggcagagccctcctcttgacctaatcaccattttttttttcttttgagacagaatcttgctctgtcacccaggctggagtgcagtggtacaatctcagctcacttaaacctccaccttccaggctcaaacagttctcctgcctcagcctcccaagtatctgggacttcaggtgcatgccactgtgcccggctaatttttatatttttagtagaggcggggttttgccatgttggtcaggctggttataaactcctgacctcaggtgatctaccctcctcggcctcccaaagtgctgggtttacaggtgtgagccactgtgcccggccttgtcacctcataaaggtcctacctctcaacacttgcattggggatttagttttcaacacgtgaactttgggggacacattcaaaccatagcagtggcaaaaaaaaaaagccctagccccaacaaaacaaaaataccaccatcaataaaaatcaaatataggcctgggtgcagtggctcacatctgtaatcctagcacttggggaaactgagatgggcagatctcttgagctcagaagttcaagaccagcctggccaacatggcaaaaccctgtctagacaaaaattacaaaaattagccaggcattggggctcgctcctgtagtcccagctacttgggaggctgaggtgggaggatcacttgagatctcccacctcagaagtaacagtgaaccaagatcacactactgcactccaacctgggtgacagagggagaccctgtctccccacacacacacacacacacacacacacaaactaatgaaaaaataagtaaacaggcaaataaaaataaactaaaagagaatcttaattagattggaggggatcttcaggtgattaaatactgaaggaaagtaggggcacaaattgtatttggggacatcttaaccctgtatgggttgatagacctttcaagtctgtctactagaaaactccctcaaatcttatttcagagaaagtatgggctgacttgacaggactgatcagttttatcagtgacacatcttatcatttaaacagtgcaagagttaatggttggttattaagcactcagtaaaggttggtgaacatgtacatacaggactagatctctcctctgtaatccactctaaataaatacttcagtctggttacaaaatacttaatactgtactgaagatttttgtacagctgatcatttggatttacatttgggtaattttatcattacatctcatgcttcattattctttcagctattcccttcagcaagctcaagctttttatacgtttccatttcaacaactgatggctgaagctcctaatatggcagttgtgaatgaacagcaaatgccagaagaagttccagccccagctcctgctcaggaaccagtgcaaggtagtttcaccatgagagcttagaaagttcaacatcggatcagccagcttatttgagaaagggtttcatggtgaattttagctctattttagtgttaaaaagtcaaatccactttttaagtacttagtatgtgctaagcactgataggttctggggaataaaagaacatgggtcctgcccaaaaatatctcataatctagtagagaaaagtaataagtaaatacacgttacagctcagcacagtttgtagtgaagaggggcatagaatgaatgccctgaaagcttatggggttggcttctaactcagactgatggctcagaggctgcttcccagagcagagaaataacaccagggctctgaaactccaacaatgtggaggcttcatcccgataaagatcagagtagggacatgtccaggctgagggagctatacaggctgggtacagacacacacaagcatggcatggccagaaacagagcaattctgtgtccttggagtctgggatataacaaggaaatggtgagaggtgaggctggatggggacagttgaaacttgttttttaatcccaaagaatttatattctatcatgaaggcaatagggagctgttgagagaatgtaagcaagggatgacttacttgactggtgctttacaaattagcctggaaatattagagaagatagattggttggtagacaacaagtcggaacttggaggcaggccgggcacagtggctcatacctgtaatccctgcactttggaaggctgaggcgggtagatcacctgaggtcaggagttcatgaccagcctggcgaacatggcaaaaccctgcctcacacaaattagccgggcatggtggcgcacacctgtgattccagctactggggaggctgaggcacgagaattgcttgaatcctggaggcggaggctgagaggctgcagtgagccaagattgcaccactgcactccagctgggcaatagtgcgagactctgtctcaaaaacaaaaacaaaaacaaaaacaaaaacaaaacttggagtcaaggagtggattagatggattagagacactgtttgaataatctaggggagcactgaggaggacctgaaggggtggagaaagaattaggaaacacttaggaggtagaattacctagccatggctaatgggtttcatgtgtttggggggagcatggcaggatagtgggggagaaaggggagtccagaagtaactaccaggtttctggcattggcatttggttggaggaggtgccactcaccaagacagagaattagaagaaaataataggttccaggggtgggagagtggttggagagaagttaatgattttctccagtgtaacagtattttatgagaaatgtgctcagggttttggtttatgattgcaggaacacatctaataactctgcctccgcattaggacttccccagctacatgccagtgatggtggatctgttggcatagggagtggctaagacaatgtgaggcagaagagaggagggactgactgcctgtatcctgcgaggcttgattggggaaacgccaaagaggagtagaatagggtagaagcctgagtagttaggagaaatgttaaataattaagggtaagaaaatcagggcttcctgttgggtaactataggtcagtggttttcaatcaagggtgattttgccctcccaagggacatttgacattgtctgaagacacttttgatgatcaagactggcaggttactactggcatctagtgggtagagatcaggggtgctattaaacattctgtaatgtgcagtacagccacccacaacaaaaaattatgcaacctaaaatgtcaatagtgtggaggctgagaaactgctttacgtcctgaggttggatccctcctcttgccttttgaaaaatactgccagcccagagatgtcatcctgggcacccctaaattcccctcttcaactatgtatggaacagaatatacacctcatctctaaaacaagcccacaagccattgtgtttttcttttttctttcttttttttttttggacagagtcttgctctgttgcccaggctggaatgcagaggcatgatctcagctcactgcaacctccacctcttgggttcaagcaattctcctgcctcagcttcccgagtagttggaattacaggtgcacgacaccatgcctggctaatttttgtatttttagtaaagacgggggtttcaccatgttggccaggctggtcttgaactcctgacgtcaggtgatctgcctgccttggcctcccaaagtgctgggattacagacatgagccaccatacctggcccatttgtggttttctactggggaagttgagttaaaatgtttcccttccttcctgtttctctatttttctgttcttatttaattatttatgtatttacatttagaatttatataaaatgatatgtagatactttgtatccttgaggaggttaagatgccaagtaatactgtgtcgaaaataatagtctatgattattcttcccacgaacagctagcaggggaaggagagtggcatggggggttgcacgaacccagttctagggagaaagaaagggaagatattgcagaggagactcatgttgggactgtaagagcttaattttggggagacaggtacaaaaggtgctagttgggtaacttttctgggaaagctgctaaagtttctaagttaagattttctgcatttctggaaattatttgtatttcagaggctccaaaaggaagaaaaagaaaacccagaacaacagaaccaaaacaaccagtggaacccaaaaaacctgttgagtcaaaaaaatctggcaagtctgcaaaatcaaaagaaaaacaagaaaaaattacagacacatttaaagtaaaaagaaaagtagaccgttttaatggtgtttcagaagctgaacttctgaccaagactctccccgatattttgaccttcaatctggacattgtcattgtaagatctttgtcctcgttggattttataagtagtattgggggatcagctttacttaacagttgtccttgcaaatagcattttgctgaaaaggaccatttctaagaatccttttggtggtaaatggtgtcagcttcatgaggttgtgttatatgagagtgtttaagagggtgggctccaaatttagactgtctgggttcaaatcctgtcacaagtataatcttggataagtcttattaacctttctaaacaccggttttctcattgataaaccaggggtgataataccaccccccgatagggttgcaagtaaatgagagaatccatgtgaatcacttcaactgaatgatgcctgtggagacctgatacatggcagcactaattttaagctcttatttttctcagtaactgtaagaaacatcagcatgtgaacaattgtgtaggtgatgtggagcgagcttcttgttgaaagttgagaatcagaattgtggctggacatgggctcagattgattgttccaggacctgtctttccagactcaaagcagcccagttggtgagggtgcgaggcctgggatcataaaggagtcaaactggttttttaaaataacagcaaaacttttaaaataaagaaaatctctttcccatatatgaaatactttgttcagatcaagagtagtaattgataaatgatattgcttatgatgctgaattaaatttgtattttaatcaactcaattttgtccaccactcctccatagaaacgctaaggcttaggtcctgctttttaagatgaaatgtctaattgttttgttttatagattggcataaacccgggactaatggctgcttacaaagggcatcattaccctggacctggaaaccatttttgtaagtggttaccttttaaattaatttacttttaaattaggtatctttgttaacaggttttttcagaaaaaccaattgtgtttttaaaaagaaagagactgtaaatacacattcgtgtttcatgttctgtgtgtgtgtctgtacgtgaaaataagagagtttgaaatgatatgttactgttaacattttagtctatgagaatggagggatgtgaataagagtactttctcttttgtttgaattgtttctaatgagttgtactacttttttttttttttttttttttttttgagatggagtttcgctctttttgcgcagactggagtgcaatggcgcgatctcggctcaccacaatctccacctcccaggttcaagtgattctcctgcctcagcctccctagtagctgggattacaggcatgtaccaccacgcctggttaattttgtatttttagtagagacggggtgtctccatgttggtcaggctggtctcgaactcccggcctcaggtgatctgcccacctcagcctcccaaagtgctgggattacaggcgtgagctacaacgcccagccaagttgtattactttttaaaaatgattttttaaaagttgttatctataggcatagtaacgatagtatagtacatctttgtggcagtgcagacataatactaactttcccagatttctggtgattattttctagcagagcataaaatagtagtaaagactcatatttttagagtaagttttaaaaccaagtgttggctggatctggtggctcacacctgtaatcccaacactttgggaggccaaagcaggaggatcacttgaggccaggagtttgagactagcctgtacaacataccaagatctcatttctacaaaaaaataaataaaaaattagctgagtgctgtggtgcacacctgtagttccagctactacggaggctgggttgggaaaattgcttgagcctgagaggttgaggctgcagttagccataattactccactgcactccagcctaggtgacagaactagaccctgtatcacaaaaacaaacaagaaaacaaacaaaaaacaagcgtaactactgttgcattgccttctctatataagttgtcttgtatataaatcatcttattttatactgcctaatagatcagtgtatgcagtatacgctcaggaaattgattatctaatagtaacattcaaaacatttagggcaactgatagtaatgtggttttggaactaataataacatattgtccctattattttaaaaaattcctttttaagggaagtttggacttttgactttcttcactgtcaaggtgtttgaatgttgttagtctagtgctgtatgtttacgtgtgaggtggtggtatcaccaattgtaaagcaaaatagtctcaaagtttcctaaactgagttgctatatattcttgggcaggcatttgcctcaaccccctgtgaaaaggagataataatagtatcttgcaagataattatgatgattaaatccaagcgctgtggctcacacctgtaatcccagcaattttggaggctgaggtgggaagatcacttgagcccaggaattcaagaccagcctgggcaacatggtgaaaccctgtctacaaacaatacaaaaattagctgggcgtggtggtgtgcatctggggttccagccactcaggaggctgaagtgggaggattgcttgagcctcggtggtcgaggctgcactgagccatgatcgtgccactacactctagcctgggtgacagagcgagaccctgtctaaaaaaaaataaataactgaattttcattttacagggaagtgtttgtttatgtcagggctcagtgaggtccagctgaaccatatggatgatcacactctaccagggaagtatggtattggatttaccaacatggtggaaaggaccacgcccggcagcaaagatctctccaggtaagtacacagcatttgcttttatgggttggaaccttgagtatgctggtgccccaaatattctaggaacatcatatgtatctagttcaagctgagctcaacaaatgtacaatatgctctttcattgaaagctgtctgaatttagcatattataaatattgtcatatttatatttttgactactttttaattcaattttagtaaagaatttcgtgaaggaggacgtattctagtacagaaattacagaaatatcagccacgaatagcagtgtttaatggaaaatgtaagatttacttttaaattttttttttctttgctaacattatgggcaatgtaaatatgtttgtatttcattttaggtatttatgaaatttttagtaaagaagtttttggagtaaaggttaagaacttggaatttgggcttcagccccataagattccagacacagaaactgtaagtccctaaaattgaatttgtaaatcagctaaatgtgaatttttttctagataatttccttatttgtcctatccattgtgatttataccatgcaaaacaattacactgtattttgttgaataatacctatacatcagctttaactaatagttgtaaattaattcaaatactattagggtttattagaaagaaaaacatttgtcagctaaatgtcttgatgttgttattcagtgaaaatattgagaggaactggctcatatactacattcagaatacatttaatggcatgtagttgtcaaattcaaatggtttagccctcgtactgttgtgaaacaaacatggaaacacagacatgatcctgattaggaaaaccagttgccccatttatatatcttagctcaacttcattttagagccatataaataatacaacccagacaagcctccagccaacctaactggcattcaatactgttgtcttatacacaaagtcatcatgaaataacagtgtttttcaaattgtcctctctacagagcttctgcaggcatttggttccaattttgcttcttagttttaggttttatttacaacttttaaagaacaacacagtgcacagatttacatgttgtatatacaacatcttaactgatggagaagctaatttgctgccaggtttttgtggaaacctaaaaatgtttctgccacctaaatatatttaaatttctcctttaaaattgtttttgttcataatttcttataaatatgcaattgatgagttttattatagcattggtttttgcttaaataaaggcccacctttgtctgcttggttaaaatggtacaaattcactacctgtagtgaattgtagagaaattcctgtagagtactgtgtcattctctgttacatgccatttggaggccgggcgtggtggctcatgcctataatcccagcactttgggaggccgaggcaggcggatcacctgaggttaggagttcgagaccagcctggccaacatggtgaaaccccatctccactaaaaaatacaaaaattagccaggcatggtggcatgcgctgtaatcccagctacgtaggaggctgaggcagaagaatcgcttgaacccaggaggcagctcattaggcggaggctcattatttttcacttcctgacttggtaataagtcagtattacaaattcaaccttaaaagcaactacttttattgatttttacatatatttatatgtagttaagtatcaagttattaacccaaataaagacaaatattctaatctcaatgagtgaattcaatagaattataagatttctgaaattataaaatgttgtgattctagctctgctatgttatgccatcatccagtgcaagatgtgctcagtttcctcgagcccaagacaaagttcattactacataaaactgaaggacttaagagatcagttgaaaggcattgaacgaaatatggacgttcaagaggtgcaatatacatttgacctacagcttgcccaaggtatgttactgtcctcattccttttattcattttgtgtgtgtatatatacacatatatacttacatatatatacacatatacatatatacatatacacatatacatatgtgtgcacatatatgcacacgtgtatatatacatgtgtatatatacatatatacacataagtatgtatgtctatatacatatatgtgtgtatacacttgtgtgcgtatacatatgtgtgtgtctatatatagacacatacacacacacacacacacacacacacacacacacacacacacattacagaaagtatcttatggatttaaaagcaggaaaaaagaaaacaattatattcgcagccagagtgctctgataatgaatattagtcactgttaaaatctccttttaccaaggtcttccctctactctggcacttctgcagataattcacctgcagagtgccagagcagagggatgtaagaaatattgtaccctacgtaaagttgaatgtaagcggtttttacagttcttatgtgtttatttagtacatgctataagtttaaaagattaatagagatgtatctcagtgtatatgaatattcaagaaaaagaattgttcatgatttctgaataaagctacttttaaaattgttgtacaaaatcagatttaaatcctttttaccttcctcacagaggatgcaaagaagatggctgttaaggaagaaaaatatgatccaggttatgaggcagcatatggtggtgcttacggagaaaatccatgcagcagtgaaccttgtggcttctcttcaaatgggctaagtatggttccctccacatgtgtattcctttcaaagacggtttggtcaggattggggggaaaattttaatagaaggagagtaaattattgaagaatgggaatgataatatgaaattttatttagtgactaatagtgaaaaattgatggttatttcacgttgaattacacagacttttacagtacattttcttttttgtttgtttgtttttgagacagattctcgctgtgtcacccaggctagagtgcagtggctcgatcttggctcactgcaagctccccctcctgggttcacaccattctcctgcctcagcctcccgagtagctgggactacaggcatccgccacgatgcctggctaattttttttgtatttttaatagagacagggtttcaccgtgttagccaggttggtctcgatctcctgacctcgtgatctgcccaccttggcctccaaaagtgctgggattacaggcatgagccaccgcacccggcctacagtgcattttctttaagtcatgaactctaggccatcctagttgcattttcctcctttaataacaaatgagtcctgtatctgaagaacagaaacttaacagttgtattccggaagcttgcttaactattttaataataattctccttcactagactgttaaaatctcctactttgatcatttaaaacttccaggccgggcatggtggttcacgcctgtaatcccagcagtttgagaggctgaggtgggtggatcatttgaggtcaggagttcgagaccagcctggccaacatggtgaaaccccatctctactaaaatatacaaaaattagcatggtggcaggtataatcctagctacttgggaggctgaggcaggagtatcattatatataatatatatgcctctcctcgatcccgggaggcagaggctgtagtgagccgaaatcacaccactggactccagcctgggtgacagaatgagacaccgtctcaaaaagaaaaaaaaaaacttcaaataagctgatacggtggctcacacctgtaatcccagtgctttgagaggctaggatgggaggatcactcaagcccaggagtttgaggctgcaaagagctgtgatcatgccactgcattccagcctgggcgatagagtaagacccagtctctactttaaaaaaagcaaatatttctaaatggcataaactaactttgtttttcttttctggcagttgagagcgtggagttaagaggagaatcagctttcagtggcattcctaatgggcagtggatgacccagtcatttacagaccaaattccttcctttagtaatcactgtggaacacaagaacaggaagaagaaagccatgcttaagaatggtgcttctcagctctgcttaaatgctgcagttttaatgcagttgtcaacaagtagaacctcagtttgctaactgaagtgttttattagtattttactctagtggtgtaattgtaatgtagaacagttgtgtggtagtgtgaaccgtatgaacctaagtagtttggaagaaaaagtagggtttttgtatactagcttttgtatttgaattaattatcattccagctttttatatactatatttcatttatgaagaaattgattttcttttgggagtcacttttaatctgtaattttaaaatacaagtctgaatatttatagttgattcttaactgcataaacctagatataccattatcccttttatacctaagaagggcatgctaataattaccactgtcaaagaggcaaaggtgttgatttttgtatatgaagttaagcctcagtggagtctcatttgttagtttttagtggtaactaagggtaaactcagggttccctgagctatatgcacactcagacctctttgctttaccagtggtgtttgtgagttgctcagtagtaaaaactggcccttacctgacagagccctggctttgacctgctcagccctgtgtgttaatcctctagtagccaattaactactctggggtggcaggttccagagaatgcagtagaccttttgccactcatctgtgttttacttgagacatgtaaatatgatagggaaggaactgaatttctccattcatatttataaccattctagttttatcttccttggctttaagagtgtgccatggaaagtgataagaaatgaacttctaggctaagcaaaaagatgctggagatatttgatactctcatttaaactggtgctttatgtacatgagatgtactaaaataagtaatatagaatttttcttgctaggtaaatccagtaagccaataattttaaagattctttatctgcatcattgctgtttgttactataaattaaatgaacctcatggaaaggttgaggtgtatacctttgtgattttctaatgagttttccatggtgctacaaataatccagactaccaggtctggtagatattaaagctgggtactaagaaatgttatttgcatcctctcagttactcctgaatattctgatttcatacgtacccagggagcatgctgttttgtcaatcaatataaaatatttatgaggtctcccccacccccaggaggttatatgattgctcttctctttataataagagaaacaaattcttattgtgaatcttaacatgctttttagctgtggctatgatggattttattttttcctaggtcaagctgtgtaaaagtcatttatgttatttaaatgatgtactgtactgctgtttacatggacgttttgtgcgggtgctttgaagtgccttgcatcagggattaggagcaattaaattattttttcacgggactgtgtaaagcatgtaactaggtattgctttggtatataactattgtagctttacaagagattgttttatttgaatggggaaaataccctttaaattatgacggacatccactagagatgggtttgaggattttccaagcgtgtaataatgatgtttttcctaacatgacagatgagtagtaaatgttgatatatcctatacatgacagtgtgagactttttcattaaataatattgaaagattttaaaattcatttgaaagtctgatggcttttacaataaaagatattaagaattgttatccttaa

SEQ ID NO: 19 - DNA, 24 bp, Artificial Sequence
  Primer
ttttttaggtgggtgttggtagtt

SEQ ID NO: 20 - DNA, 25 bp, Artificial Sequence
  Primer
aattcccctaatccaataaaattcc

SEQ ID NO: 21 - DNA, 30 bp, Artificial Sequence
  Primer
attggataaaggtatagttgttaaaagaag

SEQ ID NO: 22 - DNA, 25 bp, Artificial Sequence
  Primer
aacaatcacaatctcaacaaacaac

SEQ ID NO: 23 - DNA, 25 bp, Artificial Sequence
  Primer
tttttagtggaagtagagtgggaag

SEQ ID NO: 24 - DNA, 25 bp, Artificial Sequence
  Primer
ttaaaacaacctccttacacaatcc

SEQ ID NO: 25 - DNA, 30 bp, Artificial Sequence
  Primer
gtttatttataggtttttttagatggtttg

SEQ ID NO: 26 - DNA, 29 bp, Artificial Sequence
  Primer
catcaaaactaactttatctcctaactca

SEQ ID NO: 27 - DNA, 30 bp, Artificial Sequence
  Primer
ggagattttttagtagagaataggtttttt

SEQ ID NO: 28 - DNA, 25 bp, Artificial Sequence
  Primer
tactacccaaaaccctactaatccc

SEQ ID NO: 29 - DNA, 28 bp, Artificial Sequence
  Primer
tttgttttatagtgggtagaatttattt

SEQ ID NO: 30 - DNA, 28 bp, Artificial Sequence
  Primer
aacctataaaaacattaacaaacaaaac

SEQ ID NO: 31 - DNA, 26 bp, Artificial Sequence
  Primer
gattttaaattttagtgaggggtgaa

SEQ ID NO: 32 - DNA, 25 bp, Artificial
  Primer
tccaaaacaaaaaataaactccaaa

SEQ ID NO: 33 - DNA, 28 bp, Artificial Sequence
  Primer
tttattttaatgagtaaagggtgtaggt

SEQ ID NO: 34 - DNA, 26 bp, Artificial Sequence
  Primer
cctaaaatcatacccaaacactaaat

SEQ ID NO: 35 - DNA, 25 bp, Artificial Sequence
  Primer
ggagggggtttattgattttagttt

SEQ ID NO: 36 - DNA, 25 bp, Artificial Sequence
  Primer
taactttctctacaccaaaccaacc

SEQ ID NO: 37 - DNA, 23 bp, Artificial Sequence
  Primer
ggtagtttttggttttgggtttt

SEQ ID NO: 38 - DNA, 25 bp, Artificial Sequence
  Primer
actatccctaaatctcatctctccc

SEQ ID NO: 39 - DNA, 24 bp, Artificial Sequence
  Primer
aatggagtgttttttttattggtt

SEQ ID NO: 40 - DNA, 21 bp, Artificial Sequence
  Primer
aatatcctaatcactcccttc

SEQ ID NO: 41 - DNA, 24 bp, Artificial Sequence
  Primer
gtatttttgtttaggtttttgggg

SEQ ID NO: 42 - DNA, 25 bp, Artificial Sequence
  Primer
aaaaatcataaatccctttccaatc

SEQ ID NO: 43 - DNA, 26 bp, Artificial Sequence
  Primer
tttttttaggaagtaaaaggaatgtt

SEQ ID NO: 44 - DNA, 26 bp, Artificial Sequence
  Primer
tcaaactaccctaatctcactatccc

SEQ ID NO: 45 - DNA, 25 bp, Artificial Sequence
  Primer
gatttttttaaaagtttttgtttgg

SEQ ID NO: 46 - DNA, 25 bp, Artificial Sequence
  Primer
acaaataccttcaattcactctcaa

SEQ ID NO: 47 - DNA, 20 bp, Artificial Sequence
  Primer
gtttttgattgggtaggggt

SEQ ID NO: 48 - DNA, 26 bp, Artificial Sequence
  Primer
aacttaccataaatcataaccaaacc

SEQ ID NO: 49 - DNA, 29 bp, Artificial Sequence
  Primer
gagttttgtgaaagtagataaaagaaaat

SEQ ID NO: 50 - DNA, 23 bp, Artificial Sequence
  Primer
taacacacaaaccaaaaaacatc

SEQ ID NO: 51 - DNA, 27 bp, Artificial Sequence
  Primer
tggttggtagtatttagatagtggttg

SEQ ID NO: 52 - DNA, 24 bp, Artificial Sequence
  Primer
atatacacaacaccccaaaaacaa

SEQ ID NO: 53 - DNA, 24 bp, Artificial Sequence
  Primer
aggttgttagagttggttgtggtt

SEQ ID NO: 54 - DNA, 26 bp, Artificial Sequence
  Primer
aactttctaaatctcaaatccctcaa

SEQ ID NO: 55 - DNA, 26 bp, Artificial Sequence
  Primer
gggaaggttattattattgttgtttt

SEQ ID NO: 56 - DNA, 22 bp, Artificial Sequence
  Primer
aaatcccaaaattctacaccca

SEQ ID NO: 57 - DNA, 24 bp, Artificial Sequence
  Primer
gttttttgttaggtttgaaagggg

SEQ ID NO: 58 - DNA, 27 bp, Artificial Sequence
  Primer
aaaaaaaatctaactccaaaactctaa

SEQ ID NO: 59 - DNA, 496 bp, Homo sapiens
tcccttaggtgggtgctggtagttcctgggagagttgacgggatggagcaggccaggggggctgagaagttggcctggcgagagaaggtgggtgggactgggagagcctgggcagggaggggcctttctgggagggagtgtcatggggctggccgagatccaggacccaggagactggccaagctgccacaggaggcctgagaggctgagcatgggggggccaacactgacagactttaacaagtttctggctcccccaggaaaaaaacagaccacatctgatccttggccctgagtccagagtgggaggcaccgtgacaacaatgcgcagagcagggaatgcagggagccatggatagtgctggggtgagctggagtcctggcaggggcccagctagggcagtactcattctgcagagcctgggagaaggggctgcctccttgggaggggtttgtgtgggagtctcagcgggaattctattggaccaggggaacc

SEQ ID NO: 60 - DNA, 385 bp, Homo sapiens
actggacaaaggtacagctgctaaaagaagtgctcgttcattggcttcgacagctgtacgactggtttctaattgctgttccagcctctccccagttccatataccacaaacgaatgaaaaagattagctctccctggagctctctgaggctgaaccttgctctctcattacacatggtaactaagcacaccccttaaagaattttgggaagtcgccccgcgattaccggctcccccaagaaccaagcagtcagtgcagggttttgcaagtgagagtgcgagactcgggaggctgctcacggtgctccagtccctggcaggagcatggacacctcgccccttccttccgtgggcctcaacgttgcctgctgagattgtgactgcc

SEQ ID NO: 61 - DNA, 474 bp, Homo sapiens
cccctagtggaagcagagtgggaagcaggtgggtggtggggtaggcggggcgggaagggaggcggaggagaaggtcccggcagacgaagcgagccccctggtggaagccagcagaaccaggtgcgtggcggcggaggcggggcggcccgctgggaaaccgaggaggggtcggattagttgaggggtggggtggggatgttctttggaatcaggatcactctttctttgggtgcttgtgtatgtccacaatttaaagaaagcaggaaacagggcaggggagttccttcatctagtaattccataataattgacgctagggaaactaggggagcagtgctctcacaggttttataaatgccagcatgtggtggaagattactcaacagttaataaagataatttcaagtggtggtaatgaagtagaaaataaaaacagtgtaatgtggtagggattgtgtaaggaggctgcctcaa

SEQ ID NO: 62 - DNA, 306 bp, Homo sapiens
gttcatccataggccctcccagatggtctgcgaggtgacaatgttgctgccgatgaaggccgtcacgcgccacatgggcagcgcgcagcacagcatgacggccagccagcccaggacggccagcgcgatgcccattacctgtagccccatggaggccattgttcagcgtccacgggagttgaggacctggaaggctgaggggatccggctgtgggggccgtaggattccaagcgctggggacggacttaacgttcgcagagtgcacctttgcaccgtgagtcaggagataaagccagtcctgatgc

SEQ ID NO: 63 - DNA, 303 bp, Homo sapiens
ggagattctccagtagagaacaggccctctaggttgcatatcaatagggagcatgtttaaggaatgttagccggtagtctttgctaggtgtgaggggtgaaatttttctttatcaaggctcaactgttttcgaagtcttcaggcttgaagttctggagaaaacaactaggctctccgggcgagatcccgaataccagtttaagggatttgaaatgcaaggccgtctgggactccactgccacggatgggcaccaggcggcgccggtcggatccgtcccgggactagcagggctttgggcagca

SEQ ID NO: 64 - DNA, 330 bp, Homo sapiens
tttgttttacagtgggcagaattcactttgctctaacttgactccaagatgacacaatttcccagttttttttttaacggctaggggatgggggtatgcggaacagaacacagtggtctagctaaccgatttccgctagacgtccagctatctttcaaaatattttgtttctgcacggcaacttcagccgctaaaaaagcatccagcttacaacggaacctggagggttggtaaaggccccctgcgctggccccgccccatgggaccgggcggcgtgggcgtgagaggcggggcggggccgcgctctgcttgccaatgtctttataggtc

SEQ ID NO: 65 - DNA, 417 bp, Homo sapiens
gactctaaatcctagtgaggggtgaatggggaggctagaacagccggcccttccctgcaggaagcccccattgggttggggtctgggaaaagggacagactggctgaggggggaagggcctggagccgggggtggtgggggcagcggggatgtcgggggtggcgggggtgggggaaattcctaaaataaggaaaccgtagccccgggggtcccgggtttccatataacaggcatctctgaagtgcctgtgctgtgcctggcgctgtgctagggagacacttccattcattcttcccactccagttaactgagcatctattaggctccagcccctatgctgggttctgaggatgcagcgacgcagaatagaagacaagagaatgttccttctctctggagcttaccttctgctttgga

SEQ ID NO: 66 - DNA, 368 bp, Homo sapiens
tccactccaatgagcaaagggtgtaggctttgagtatacacagcaggccacacactatgggtcatggcatacagtctagcgttggaggttgctgcatttgttcatgtatctatgagttaggttttaagttttttccccctgttctattaatataattaattagttaattaaccccactcattcatttactcagtccacagccttttgttaagagcccgcctaggacataaagatgaagatccagtgcctaccctcatgaaacatagaatccgagcgaagaaggcttactttgcaatagtcatccaagtggtgcttttatggcgctttactgctcccgccaacacccagtgcctgggtatgacctcagg

SEQ ID NO: 67 - DNA, 439 bp, Homo sapiens
ggagggggcttattgattccagccccgggcgctcgctcgggggcctacagaatggcgtgtttcggggttgtggcgggccgaggggcggggtcgcagcaaggccccgcctgtcccctcctgggcctctcaaagtctgagccccgctccgctgatgcctgtctgcagaatccgcaccaaccagcaccatgcccatgactctggggtactgggacatccgtggggtaagcgagggtcctctggtgggtgggacagggggcggaggcggggatgtgtggagtagctgcaggactggctctagggaccgttcctcttcagggctgcccgcctcagaagggcctgtgcatgacgctgtgtgtgtgtttgggggtgggggcgggtagaggaggcgacgggtacgtgcagtatagactaggggctggcctggtgcagagaaagtcac

SEQ ID NO: 68 - DNA, 395 bp, Homo sapiens
ggcagcccctggctttgggtcctgggtactagcaccccagttcattcccggtacccttcctgtcccagatgtcctggaatgagctgctccgggccccagggaggtgccctggacgccccttacccagggactcgctactgcccagaatgctctggaggccctgattcgggtgaggctgagggaagaggcgggagacacgaacgtagacgtagaagacatgcgatctggatggaacccaggacactccacttccggacctgaaggggaaatggagcctctagagtggcctgtggaagggtctggatttccctttaagtaaagacatacggagggacggagacccacaggacttgagggagggacggggagagggagagatgagactcagggacagc

SEQ ID NO: 69 - DNA, 255 bp, Homo sapiens
aatggagtgcccttcccattggcccgagcgtcattccccgaggtggcactgcccgcctgattggctggccactccagaccccccgcccactcctccactcgggtagccggactccccgccccccagcaccgcccggagcccccgccctcgcctctccctccgcgcccccgcccgcgcgcccagcgggctccgctcggctcgcgctgcgacccggcccgcgcgctggtcccgcccccggggcgcacggctctataa

SEQ ID NO: 70 - DNA, 391 bp, Homo sapiens
gcacctctgtctaggcctctgggggcgccccggccccgcccccgccgccctcggccaatcagacgtgcgtctcctcggccccggggcggagcgggccaggtgtgggaaatgaacagggctgggcgctagatacctgcgtggggtaggacccgcgaggaagaggtacgtgcggatcggtgggagagccaggcaccagacaggctcctgcactggagggttcggtccccgcctcttcatcagccaagctggggagatgcggcccttactgggacttggcaccgccctggtgggtgggttctatcagtttagaaccttggcctctgcctggcgcactgtggtcagggacgacttctccattccagcctggactggaaagggacccatgatctct

SEQ ID NO: 71 - DNA, 344 bp, Homo sapiens
cctccttaggaagtaaaaggaatgttagtgtgggattttgcattggaggctagtgctgaccccactgcagtggaacacagcactgggcagagcctccaaggcccttgattctaggctggaggccacagagggagcatttagacccccgccccgggtcagagggaaatctgctacctcagcaggaggaatccaagttccagtccacttcacaaccacctaactaaagtggccttccgccagaccctaaaacaaagatttgcattcaggtagattatttggaagatgatttaaggacgtaccagtgcaggagttgtcgcgggacagtgagaccagggcagtttgac

SEQ ID NO: 72 - DNA, 303 bp, Homo sapiens
gattcttctaaaagctcctgcctggactactttcctggctcctctctttgcccaagcccatccccccttacaggaataatagcatctgagggaagcgtcagttgtggctgcagcgccgagccctgccccagctcacctcgatgtcactccatacagactcagagtcctggttgcacatgtcccacgccatccagctcctgaatgacgccagtcaagctttttcaactccaatccacagtgacacagagcacacactcatgcaggcaaccagccccttactgagagtgaactgaaggcacctgt

SEQ ID NO: 73 - DNA, 228 bp, Homo sapiens
gtctttgactgggcaggggcttcggacggcggcggcggagaggctagagccatggacgaggagatcgtgtccgagaagcaagccgaggagagccaccggcaggacagcgccaacctgctcatcttcatcctgctgctcaccctcaccattctcacaatctggctcttcaagcaccgccgggcccgcttcctgcacgaaaccggcctggctatgatttatggcaagttc

SEQ ID NO: 74 - DNA, 243 bp, Homo sapiens
gagtcctgtgaaagcagataaaagaaaacatttattaacgtgtcattacgaggggagcgcccggccggggctgtcgcactccccgcggaacatttggctccctccagctccgagagaggagaagaagaaagcggaaaagaggcagattcacgtcgtttccagccaagtggacctgatcgatggccctcctgaatttatcacgatatttgatttattagcgatgccccctggtttgtgtgttac

SEQ ID NO: 75 - DNA, 328 bp, Homo sapiens
tggctggcagtacccagacagtggctggactcaagctcctcctccaggcttctaccgtcccccacggaccccctttctgtgctgcacttccgcctcctcggagccaaatcccacgcgtactggccgtcacgtgatgtaggacagcccaatcacgctcacccccttctcgttggcgccccagctccgccgcttggcctttcgggaagggtggaggaccagaagacggggactaggagcgctctgccgacgtcagcttttgtctccagtattttcgggggctggtggacgcgtgggcgatagggtgctgtccttggggtgctgtgtatat

SEQ ID NO: 76 - DNA, 406 bp, Homo sapiens
aggctgccagagctggctgtggccccacagagcaggaagaagcacgccttacctgtctgggcctcggccagggtgccgagggccagcatggacaccaggaccagggcgcagatcaccttgttctccatggtggccattgcctcctctctgctccaaaggcgaccccgagtcagggatgagaggccgcccgagccccggattttatagggcaggctctgtttgcttaaagagcgttagataacatttgcctaaggaggcccggggatcctctgagacaataatctccactgatttttatcaaaggtgtttcctagacatggtcaagctacatggaaggatttgctgatagacagagacgacatgtggtgaggtcatcttggctgagggatctgagattcagaaagtc

SEQ ID NO: 77 - DNA, 394 bp, Homo sapiens
gggaaggccaccattactgctgttctacagaacgcggccctcttaaccctctccaccacctggctgtgtgggcgccgccgggagtgttcccccttccagatggggaaacggaggctccgagttagtcagctacccaaagttacacacagggagatctgatttgagccccagcagtccgactctagagaccctgtttttaattcctcttgcaggagactcgggggcccggccttctccccacctcagactacgctcccctacccctgtctcctgccacccctgggttgggtccgagtttggagcagggggctgctgagacgccaggcagcggcggggctgattgggggaagaggggaggagggcggtggcacgtgggtgcagaaccctgggatcc

SEQ ID NO: 78 - DNA, 362 bp, Homo sapiens
gtttcctgctaggcctgaaaggggcggggaaaccgtgccccggaactctgagcatgcgcagattcccgccgagcttgcgcagattcccgccgagctcgcgcagattccggccgagcatgcgcagattctctccgagcatgcgcagattcccgccgagcatgcgcagattcccgccgagcatgcgcacattctctccattccgccgtagtcgggagcgtgtggtgtttgagccgcctgaaacgctagtacgacagatttacttaaagattcacttaatcacttaaagattcacgtcccttttctctcattgagaataacacctaaggcattttgtgtcagagctctggagttagatttctttt

SEQ ID NO: 79 - DNA, 20 bp, Artificial Sequence
  Primer
tggcactaccctgaacatca

SEQ ID NO: 80 - DNA, 22 bp, Artificial Sequence
  Primer
catgaaatttctggttctgcat

SEQ ID NO: 81 - DNA, 1641 bp, Homo sapiens
tggcactaccctgaacatcaatgaaggctgtctgtttctggtcctgcttccgcagtgagaggcagcaggtccccaagcaggcgacctgcccttcaccgtgaggctgtcagccttgggggagcggggtcatttggagctgataaaccaatgagaagaaaggtttgttgctctaggcggtgggtgagggcatcatagctgactcttggtcttggtcactttcggaggagatggtttatttaacctgacttccttcctgatgcgcaccgtaggcgcagtgaaatccgggaatcgtggggaatccttggcgctgtgggtggaggctcctcttggccctgtggccaaggtgaccaagggccgaaggaaaagcgagaacgggagggacgggacgcaagagggcagatggggaaccccatactccagcaacattatataagagaggcgacgatggagcagcgcacccggccaaaaaagcctccgtgcgcctactctacggtgcaccgcgtcccctctgcaccagaagggccctgtcctcccacatccaccgcgccctcctccgggcccccgagggcactggggcgcttcctctgccagacctcccctgcgactcactcttccggctccagagcccccccgccccaacagcaaagcagccgtgacctgccccaggggcgcagccctgccccaggctggaaggcagcagagctgtggcgtcgaggcacccagcggactgcggggctggcgtgcccgcggttacctgcgcggccagagggctccgcgagatcgaagaaccagaagagcagcatgaggagccccgccgggcggcgaggggtcgcccagcctgtcctcatcctgagctggcgcaagccttccggccgggtcctcgggcgcacgcggctcccgccccgcctgctgagcgcggcctgccccgcccgcacctctgtctaggcctctgggggcgccccggccccgcccccgccgccctcggccaatcagacgtgcgtctcctcggccccggggcggagcgggccaggtgtgggaaatgaacagggctgggcgctagatacctgcgtggggtaggacccgcgaggaagaggtacgtgcggatcggtgggagagccaggcaccagacaggctcctgcactggagggttcggtccccgcctcttcatcagccaagctggggagatgcggcccttactgggacttggcaccgccctggtgggtgggttctatcagtttagaaccttggcctctgcctggcgcactgtggtcagggacgacttctccattccagcctggactggaaagggacccatgatctcttctaccccggaggaggaagtgagcacctgccctgtgggtggctgcggccaagcctaagaattcagtcgtccttggcaacgtcttgggtattttgacagtgcaaacaaaggtggaataatggtacactgcagttctacccatagttgttaaagaattaaaagcaagaattactagaatgaccaaacgacacttccaaggatgacttatgctttataaaaagttgacctttgcgagtaagctctttgcttaataatttaatgataataataattagctggtagaaatgtagaagtctgcatgcagaaccagaaatttcatg

SEQ ID NO: 82 - DNA, 20 bp, Artificial Sequence
  Primer
ctgtgacatggagcaggagc

SEQ ID NO: 83 - DNA, 21 bp, Artificial Sequence
  Primer
gctgtcgtttgccatcggcct

SEQ ID NO: 84 - DNA, 20 bp, Artificial Sequence
  Primer
catggccagtttcgatccat

SEQ ID NO: 85 - DNA, 20 bp, Artificial Sequence
  Primer
cacctgggactacacctcct

SEQ ID NO: 86 - DNA, 20 bp, Artificial Sequence
  Primer
tgctgacccagagctccata

SEQ ID NO: 87 - DNA, 20 bp, Artificial Sequence
  Primer
agaggcatcatcgcgatctg

SEQ ID NO: 88 - DNA, 19 bp, Artificial Sequence
  Primer
ggacatctaagggcatcac

SEQ ID NO: 89 - DNA, 20 bp, Artificial Sequence
  Primer
cctccgactttcgttcttga

SEQ ID NO: 90 - DNA, 20 bp, Artificial Sequence
  Primer
cacggtctgatgagctgtgt

SEQ ID NO: 91 - DNA, 20 bp, Artificial Sequence
  Primer
acgaactgcaacctgaccat

SEQ ID NO: 92 - DNA, 20 bp, Artificial Sequence
  Primer
ctggtcctcacgcagagttc

SEQ ID NO: 93 - DNA, 20 bp, Artificial Sequence
  Primer
gcgaagggcatcattgcaat

SEQ ID NO: 94 - DNA, 25 bp, Artificial Sequence
  Primer
gtgatgaaacgcacacctctcctga

SEQ ID NO: 95 - DNA, 25 bp, Artificial Sequence
  Primer
gtcatgaaaggcacacgtctgctca

SEQ ID NO: 96 - DNA, 25 bp, Artificial Sequence
  Primer
cattgttcagcatggtgaggtcgct

SEQ ID NO: 97 - DNA, 25 bp, Artificial Sequence
  Primer
cattcttcaccatcgtgacgtggct
